(19) United States
(12) Patent Application Publication
(10) Pub. No.: US 2025/0179481 A1
(43) Pub. Date: Jun. 5, 2025

(54) COMPOSITIONS AND METHODS FOR TARGETING, EDITING, OR MODIFYING GENES

(71) Applicant: Celyntra Therapeutics SA, Mont-Saint-Guibert (BE)

(72) Inventors: Roland BAUMGARTNER, Angern an der March (AT); Tanya WARNECKE, Boulder, CO (US)

(21) Appl. No.: 18/566,506

(22) PCT Filed: Jun. 1, 2022
(86) PCT No.: PCT/US2022/031835

§ 371 Date: Dec. 1, 2023

Related U.S. Application Data
(60) Provisional application No. 63/195,615, filed on Jun. 1, 2021.

(51) Int. Cl. C12N 15/11; C12N 9/22; C12N 15/90

(52) U.S. Cl. CPC C12N 15/11; C12N 9/22; C12N 15/907; C12N 2310/20; C12N 2800/80

(57) ABSTRACT

CRISPR-Cas systems have been engineered for various purposes, such as genomic DNA cleavage, base editing, epigenome editing, and genomic imaging. Although significant developments have been made, there still remains a need for new and useful CRISPR-Cas systems as powerful precise genome targeting tools. The invention disclosed herein comprises CRISPR-Cas based methods for high integration and expression efficiency of transgenes together with high post-transfection cell viability in eukaryotic cells.

[0001] This application claims the benefit of U.S. Provisional Application No. 63/195,615 filed Jun. 1, 2021, which application is incorporated herein by reference.

### BACKGROUND

[0002] Recent advances have been made in precise genome targeting technologies. For example, specific loci in genomic DNA can be targeted, edited, or otherwise modified by designer meganucleases, zinc finger nucleases, or transcription activator-like effectors (TALEs). Furthermore, the CRISPR-Cas systems of bacterial and archaeal adaptive immunity have been adapted for precise targeting of genomic DNA in eukaryotic cells. Compared to the earlier generations of genome editing tools, the CRISPR-Cas systems are easy to set up, scalable, and amenable to targeting multiple positions within the eukaryotic genome, thereby providing a major resource for new applications in genome engineering.

[0003] Two distinct classes of CRISPR-Cas systems have been identified. Class 1 CRISPR-Cas systems utilize multi-protein effector complexes, whereas class 2 CRISPR-Cas systems utilize single-protein effectors. Among the three types of class 2 CRISPR-Cas systems, type II and type V systems typically target DNA and type VI systems typically target RNA. Naturally occurring type II effector complexes consist of Cas9, CRISPR RNA (crRNA), and trans-activating CRISPR RNA (tracrRNA), but the crRNA and tracrRNA can be fused as a single guide RNA in an engineered system for simplicity. Certain naturally occurring type V systems, such as type V-A, type V-C, and type V-D systems, do not require tracrRNA and use crRNA alone as the guide for cleavage of target DNA.

[0004] The CRISPR-Cas systems have been engineered for various purposes, such as genomic DNA cleavage, base editing, epigenome editing, and genomic imaging. Although significant developments have been made, there still remains a need for new and useful CRISPR-Cas systems as powerful precise genome targeting tools. In CRISPR-Cas systems, a Cas nuclease is targeted to a genomic site by complexing with a guide RNA that hybridizes to a target site in the genome. This results in a double-strand break that initiates either non-homologous end-joining (NHEJ) or homology-directed repair (HDR) of genomic DNA via a double-strand or single-strand DNA repair template. However, repair of a genomic site via HDR is inefficient. In addition, off-target binding and double strand breaks can lead to undesired alterations in the genome.

### INCORPORATION BY REFERENCE

[0005] All publications, patents, and patent applications mentioned in this specification are herein incorporated by reference to the same extent as if each individual publication, patent, or patent application was specifically and individually indicated to be incorporated by reference.

### BRIEF DESCRIPTION OF THE DRAWINGS

[0006] The novel features of the invention are set forth with particularity in the appended claims. A better understanding of the features and advantages of the present invention will be obtained by reference to the following detailed description that sets forth illustrative embodiments, in which the principles of the invention are utilized, and the accompanying drawings of which:

[0007] FIG. 1A shows a schematic representation showing the structure of an exemplary single guide type V-A CRISPR system. FIG. 1B is a schematic representation showing the structure of an exemplary dual guide type V-A CRISPR system.

[0008] FIGS. 2A-C show a series of schematic representations showing incorporation of a protecting group (e.g., a protective nucleotide sequence or a chemical modification) (FIG. 2A), a donor template-recruiting sequence (FIG. 2B), and an editing enhancer (FIG. 2C) into a type V-A CRISPR-Cas system. These additional elements are shown in the context of a dual guide type V-A CRISPR system, but it is understood that they can also be present in other CRISPR systems, including a single guide type V-A CRISPR system, a single guide type II CRISPR system, or a dual guide type II CRISPR system.

[0009] FIG. 3 shows a schematic of a Type V-A nucleic acid guide nuclease bound to a dual guide nucleic acid.

[0010] FIG. 4 shows exemplary MAD7s with one or more nuclear localization signals (NLS).

[0011] FIG. 5 shows editing frequency at the DNMT1 locus in and post-transfection cell viability of T-cell leukemic cells following treatment with one or more guide nucleic acids complexed with MAD7 comprising one or more NLS.

[0012] FIG. 6 shows editing frequency at the DNMT1 locus in T-cell leukemic cells using multiple electroporation programs in combination with the SE electroporation buffer.

[0013] FIG. 7 shows editing frequency at the DNMT1 locus in T-cell leukemic cells using multiple electroporation programs in combination with the SF electroporation buffer.

[0014] FIG. 8 shows editing frequency at the DNMT1 locus in T-cell leukemic cells using multiple electroporation programs in combination with the SG electroporation buffer.

[0015] FIG. 9 shows editing frequency at the DNMT1 locus in T-cell leukemic cells using multiple electroporation programs.

[0016] FIG. 10 shows editing frequency by type at eight loci in T-cell leukemic cells using multiple guide nucleic acids complexed with MAD7 comprising one or more NLS.

[0017] FIG. 11 shows a comparison of editing efficiency between T-cell leukemic cells treated with MAD7 comprising one or more guide nucleic acids targeting the DNMT1 locus as compared to a control guide nucleic acid binned by editing frequency.

[0018] FIG. 12 shows editing frequency by PAM motif in T-cell leukemic cells using multiple guide nucleic acids complexed with MAD7 comprising one or more NLS.

[0019] FIG. 13A shows sequence logo plots for multiple guide nucleic acids binned by editing frequency in T-cell leukemic cells using when complexed with MAD7 comprising one or more NLS.

[0020] FIG. 13B shows nucleotide and dinucleotide frequency for multiple guide nucleic acids binned by editing frequency in T-cell leukemic cells using when complexed with MAD7 comprising one or more NLS.

[0021] FIG. 14 shows trinucleotide AAA or UUU frequency binned by editing frequency in T-cell leukemic cells following treatment with multiple guide nucleic acids complexed with MAD7 comprising one or more NLS.

[0022] FIG. 15 shows editing frequency for both INDELs and frameshift mutations at eight loci in T-cell leukemic cells following treatment with multiple guide nucleic acids complexed with MAD7 comprising one or more NLS.

[0023] FIG. 16 shows the correlation between INDEL frequency in the gNA validation experiment versus INDEL formation in the gNA screen experiment.

[0024] FIG. 17 shows the proportion of frameshift to INDELs at eight loci in T-cell leukemic cells following treatment with multiple guide nucleic acids complexed with MAD7 comprising one or more NLS.

[0025] FIG. 18 shows INDEL frequency for gNAs comprising representative spacer sequences complexed with MAD7 comprising one or more NLS in T-cell leukemic cells at predicted off-target sites.

[0026] FIG. 19 shows INDEL frequency for gNAs comprising representative spacer sequences complexed with MAD7 comprising one or more NLS in T-cell leukemic cells at predicted off-target sites.

[0027] FIG. 20 shows INDEL frequency at the AAVS1 locus in T-cell leukemic cells following treatment with a gNA: MAD7 complex.

[0028] FIG. 21 shows GFP insertion efficiency at the AAVS1 locus and cell viability following treatment for multiple primer constructs.

[0029] FIG. 22 shows GFP insertion efficiency at the AAVS1 locus with increasing concentrations of donor template (e.g., HDRT) and variable homology arm length.

[0030] FIG. 23 shows CAR insertion efficiency at the AAVS1 locus and cell viability with increasing concentrations of donor template and variable homology arm length.

[0031] FIG. 24 shows CAR insertion efficiency (A) at the AAVS1 locus and cell viability (B) in primary T-cells.

[0032] FIG. 25 illustrates an exemplary method for stabilizing nucleic acid-guided nucleases.

[0033] FIG. 26 illustrates an exemplary method for engineering a taget genome, e.g., human target genome.

[0034] FIG. 27 shows data for editing efficiency (as measured by # of reads modified/total # of reads) in primary T-cells in an Exon of an exemplary gene for a series of schematic representations of exemplary modifications to dual guide gRNA. Shown are editing results relative to the single gRNA design (left bar) vs, the negative control (far right bar).

[0035] FIG. 28 shows results of tiling experiment of TRBC and CD3E guides in Jurkat cells. (A) Schematic overview of the protein coding exons of TRBC1 and TRBC2 and the location of the designed gRNAs. (B) Tiling results of the TRBC gRNAs with the resulting INDEL and Substitution frequencies. (C) Schematic overview of the protein coding exons of CD3E and the location of the designed gRNAs. (D) Tiling results of the CD3E gRNAs with the resulting INDEL and substitution frequencies.

[0036] FIG. 29 shows results of tiling experiment of CD40LG and CSF2 guides. (A) Schematic overview of the protein coding exons of CD40LG and the location of the designed gRNAs. (B) Tiling results of the CD40LG gRNAs with the resulting INDEL and substitution frequencies. (C) Schematic overview of the protein coding exons of CSF2 and the location of the designed gRNAs. (D) Tiling results of the CSF2 gRNAs with the resulting INDEL and Substitution frequencies.

[0037] FIG. 30 shows gRNA verification for multiple TRBC1 and 2 gNAs. (A) TCR staining results after transfection of TRBC1 and TRBC2 RNPs and the control. (B) Viability of the RNP transfected cells and controls at day 1 and day 4.

[0038] FIG. 31 shows CD3E gRNA verification in Jurkat cells on the genomic and functional level. (A) Amplicon NGS results after transfection of CD3E RNPs. (B) and (C) TCR and CD3E staining results after transfection of gCD3E RNPs and the controls, respectively. (D) Viability of the RNP transfected cells and controls at day 1 and day 4.

[0039] FIG. 32 shows CD40LG and CSF2 gRNA verification in Jurkat cells on a genomic level. (A) Amplicon-NGS results following transfection of Jurkat cells with gCD40LG RNPs. (B) Viability of the Jurkat cells following transfection with gCD40LG RNPs. (C) Amplicon-NGS results following transfection of Jurkat cells with gCSF2 RNPs. (D) Viability of the Jurkat cells following transfection with gCSF2 RNPs.

[0040] FIG. 33 shows cutting, editing and functional KO efficiency of TRBC1, TRBC2, CD3E, CD40LG and CSF2 in Pan T-cells. (A), (B), (D) and (F) On-target verification of the TRBC, CD3E, CD40LG and CSF2 gRNAs treated Pan T-cells using Amplicon-NGS. (C) Functional KO verification of TRBC and CD3E RNP-treated Pan T-cells of TCR and CD3E surface expression using anti-TCR and anti-CD3E antibody staining. (E) Functional KO verification of CD40LG RNP-treated Pan T-cells of CD40LG surface expression using an anti-CD40LG antibody staining. Prior to staining, cells were treated with CD3/CD28. (G) Functional KO verification of CSF2 RNP-treated Pan T-cells by CSF2 intracellular expression using an anti-CSF2 antibody staining. Prior to staining, cells were treated with PMA and Ionomycin to increase CSF2 expression and Golgi-plug/Golgi-stop were used to inhibit its secretion.

[0041] FIG. 34 shows HDR enhancer shuts down the NHEJ pathway and enhances ssODN integration.

DETAILED DESCRIPTION

Outline

| I. | ssODN compositions and methods | |
|---|---|---|
| II. | High efficiency transgene insertion | |
| III. | Engineered non-naturally-occurring dual guide CRISPR-cas systems | |
| | A. | Cas proteins |
| | B. | Guide nucleic acids |
| | C. | gNA Modifications |
| IV. | Composition and methods for targeting, editing, and/or modifying genomic DNA | |
| | A. | Ribonucleoprotein (RNP) delivery and “cas RNA” delivery |
| | B. | CRISPR expression systems |
| | C. | Donor templates |
| | D. | Efficiency and specificity |
| | E. | Multiplex |
| | F. | Genes to be modified |
| V. | Pharmaceutical compositions | |
| VI. | Therapeutic uses | |
| | A. | Gene therapies |
| | B. | Immune cell engineering |

| | |
|---|---|
| VII. | Kits |
| VIII. | Embodiments |
| IX. | Examples |
| X. | Equivalents |

I, ssODN Compositions and Methods

[0042] Provided herein are methods and compositions utilizing single stranded oligo DNA nucleotides (ssODNs) in CRISPR systems. The methods and compositions are useful in favoring homology-driven recombination (HDR), and/or in correcting off-target modifications in nucleic acid. In certain embodiments, the CRISPR system includes a Type V endonuclease. In certain embodiments, ssODNs as described herein are used with a dual guide RNA. In certain embodiments, ssODNS as described herein are used with a guide RNA, such as a dual guide RNA, wherein one or more nucleotides of the RNA is a modified nucleotide. One purpose of the methods and compositions provided herein is to improve editing specificity for CRISPR systems. Specifically, ssODNs can be used for programming a precise on-target edit for improved functional disruption and for reducing off-target editing at other sites.

[0043] It is known that ssODNs can be incorporated into a target genome via homology directed repair (HDR) to program a precise edit. Combining ssODNs with a CRISPR endonuclease editing system to create a double stranded break at the target site for incorporation is well known to increase efficiencies significantly over the wild-type HDR alone and has been the basis of many CRISPR-based applications for genome engineering wherein the nuclease is a Cas9 nuclease. In certain embodiments, provided herein are systems utilizing a Type V, e.g., Type V-A nuclease. In addition, off-target editing can be reduced. The methods and compositions provided herein can reduce off-target effects by, e.g., using ssODNs engineered to preferentially bind to off-target DNA sites and to incorporate the wild type (wt) off-target gene back into the site, so that after repair the off-target site still comprises a functional wild type gene. In addition, in certain embodiments a composition is comprised of a ssODN or pool of ssODNs that are designed to have homology arms to an on-target or potential off-target editing site and, in certain embodiments, to have an editing window that creates a deletion of or edit that includes a PAM mutations, e.g., synonymous PAM mutation at the target PAM. In addition to the PAM modification, e.g., deletion, the ssODN can include additional edits such as stop codons or other changes that could change the coding sequence. The ssODNs are used in conjunction with a guide RNA (gRNA), which can be a single gRNA (sgRNA) or dual gRNA (dgRNA), depending on the nuclease used, and a nuclease. In certain embodiments, the gRNA comprises one or more modified nucleotides. The nuclease can be any suitable nuclease. In certain embodiments, the nuclease is a Type V nuclease, such as a Type Va nuclease. In certain embodiments, the nuclease is modified to include one or more nuclear localization sequences (NLSs) and/or tags such as a gly-polyHis tag. In certain embodiments, the gRNA comprises a spacer sequence that targets a specific gene as disclosed herein. In certain embodiments, after transfection the cells are treated with an HDR enhancer, for example for 24 hours, to block the NHEJ pathway and thereby increase the incorporation of the ssODN at the on-target side. In certain embodiments, an anionic polymer is used to increase transfection efficiency.

[0044] In certain embodiments provided herein is a composition comprising a plurality of ssODNs wherein each of the ssODNs comprises (i) a sequence that is complementary to and specific for a sequence flanking a double-stranded break at an off-target site for a nucleic acid-guided nuclease complex comprising a nucleic acid-guided nuclease and a gNA, e.g., gRNA, wherein the ssODNs each comprise different sequences for different off-target sites. As used herein, the terms “nucleic acid-guided nuclease complex,” “nucleic acid-guided nuclease system,”, and the like, include a system that comprises a CRISPR nuclease and a compatible gNA, e.g., gRNA. As used herein the term “complementary” includes a sequence of sufficient complementarity to hybridize with its intended hybridization partner, under conditions in which the sequence is used, unless otherwise indicated. In certain embodiments, the composition includes the nucleic acid-guided nuclease and gNA. It will be appreciated that a composition may instead provide one or more polynucleotides coding for one or both of the nuclease and the gNA, e.g., gRNA and that cellular machinery is relied on to provide the final nuclease and/or gNA, e.g., gRNA, and such embodiments are included herein. In certain embodiments some or all of the ssODNs comprise a sequence for a wild-type gene at the off-target site. In certain embodiments, more than one nucleic acid-guided nuclease complex is provided, where each complex has a different on-target site and, potentially, the same and/or different off-target sites. The nucleic acid-guided nuclease complex or complexes may be used to inactivate one or more genes and/or to insert a heterologous gene (transgene) at its on-target site. In certain embodiments, a plurality of nucleic acid-guided nucleases is provided. On-target sites for the one or more nuclease complexes can include safe harbor sites, such as the AAV1 site or other known or suitable safe harbor sites, for example one or more safe harbor sites in intergenic DNA. On-target sites for the one or more nuclease complexes can include one or more genes involved in host-versus-graft or graft-versus host disease, such as genes coding for one or more subunits of HLA-1 or HLA-2 proteins, and/or genes coding for transcription factors for the one or more subunits, such as CIITA, and/or genes coding for one or more subunits of the TCR. A transgene, provided as part of a donor template, may be inserted at one or more of the on-target sites, such as a transgene coding for a chimeric antigen receptor (CAR) or a portion thereof. The off-target ssODNs typically will comprise homology arms for the off-target site that are more complementary to the genomic sequence at the off-target site than homology arms of an on-target ssODN. In certain embodiments, at least 5, 10, 15, 20, 30, 40, 50, 60, 70, 80, 90, 95, 99 or 100% of the ssODNs further comprise at least one mutation, e.g., synonymous mutation, to prevent re-cleavage of the non-target DNA following incorporation of the ssODN into the genome of the cell, for example, a mutation in a PAM sequence of the off-target site, e.g., a mutation that decreases or eliminates recognition of the off-target site by the nucleic acid-guided nuclease complex, such as a decrease of at least 10, 20, 30, 40, 50, 60, 70, 80, 90, 92, 95, 97, or 99% in recognition of the off-target site: it will be appreciated that without recognition there will not be cleavage at the site. In certain embodiments, use of the composition in combination with one or more on-target gRNAs allows repair of off-target cleavage sites, where the off-target ssODNs comprising a replacement wt gene at the off-target site are thought to out-compete the on-target ssODN for repair of the off-target DNA breaks, then modification of the sites so that the RNP will not recognize the repaired sites and further off-target cleavage is avoided. The composition can further comprise an on-target ssODN, that is, an ssODN that comprises (i) a sequence that is complementary to and hybridizes with a genomic sequence flanking a double-stranded break, if present, at an on-target site for a gRNA that is complexed with a Cas nuclease; and (ii) a sequence to modify the coding region at the on-target site. The modification can include one or more insertions or deletions, or changes in the native sequence. In certain embodiments, the modification can include an insertion or a deletion that creates a frame shift in the reading frame of a protein and/or a stop codon or several stop codons to truncate translation of the protein. In certain embodiments, the composition comprises at least 2, 5, 7, 10, 12, 15, 17, 20, 25, 30, 35, 40, 45, 50, 60, 70, 80, 90, 100, 120, 150, or 200 different off-target ssODNs and/or not more than 5, 7, 10, 12, 15, 17, 20, 25, 30, 35, 40, 45, 50, 60, 70, 80, 90, 100, 120, 150, 200 or 500 off-target ssODNs. The length of the ssODN may be any suitable length, for example at least 20, 50, 70, 80, 90, 100, 110, 120, 130, 140, 150, 160, 170, 180, 190, 200, 210, 220, 230, 240, 250, 270, or 300 nucleotides and/or not more than 50, 70, 80, 90, 100, 110, 120, 130, 140, 150, 160, 170, 180, 190, 200, 210, 220, 230, 240, 250, 270, 300, or 400 nucleotides preferably 100-300 nucleotides, more preferably 150-250 nucleotides, even more preferably 180-220 nucleotides. The ratio of molar amount of off-target ssODN for a given off-target site to the molar amount of on-target ssODN can be any suitable ratio: the ratio may be different for different off-target sites or the same. Exemplary ratios (single off-target ssODN: on-target ssODN) include at least 0.1:1, 0.5:1, 1:1, 1.2:1, 1.4:1, 1.6:1, 1.8:1, 2:1, 2.5:1, 3:1, 4:1, 5:1, 7:1, 10:1, 15:1, 20:1, 50:1 or 100:1 and/or not more than 0.5:1, 1:1, 1.2:1, 1.4:1, 1.6:1, 1.8:1, 2:1, 2.5:1, 3:1, 4:1, 5:1, 7:1, 10:1, 15:1, 20:1, 50:1, 100:1, or 200:1. The ratio of off-target to on-target ssODN used can be dependent on the predicted likelihood of cleavage at a given off-target site vs, cleavage at the on-target site, which can be determined by methods known in the art. Typically the ssODN or plurality of ssODNs (off-target and on-target) will be used in conjunction with a nuclease and a gNA, e.g., gRNA. The nuclease can be any suitable Cas nuclease, such as a Class 1 or Class 2 nuclease, e.g., Type I, II, III, IV, V, or VI nuclease, in some cases a Type V nuclease, in preferred embodiments, a Type V-A, V-C, or V-D Cas nuclease, in more preferred embodiments a Type VA nuclease, including but not limited to a Cpf1 nuclease, derivative, or variant: a MAD nuclease, derivative, or variant: a ART nuclease, derivative, or variant: a Csm1 nuclease, derivative, or variant: or an ABW nuclease, derivative, or variant: specific examples are provided herein. In preferred embodiments the nuclease is a Type V-A nuclease. In a preferred embodiments the Type-V-A nuclease is a MAD, ART, or ABW nuclease. In more preferred embodiments Type-V-A nuclease is a MAD nuclease, such as a MAD1, MAD2, MAD3, MAD4, MAD5, MAD6, MAD7, MAD8, MAD9, MAD10, MAD11, MAD12, MAD13, MAD14, MAD15, MAD16, MAD17, MAD18, MAD19, or MAD20 nuclease, preferably a MAD7 nuclease. In other embodiments the nuclease is a ART nuclease, such as an ART1, ART2, ART3, ART4, ART5, ART6, ART7, ART8, ART9, ARTI0, ART11, ART11*, ART12, ART13, ART14, ART15, ART16, ART17, ART18, ART19, ART20, ART21, ART22, ART23, ART24, ART25, ART26, ART27, ART28, ART29, ART30, ART31, ART32, ART33, ART34, or ART35 nuclease, preferably an ART2, ART11, or ART11* nuclease. In certain embodiments the nuclease has an amino acid sequence at least 80, 85, 90, 95, 99, or 100% % identical to the amino acid sequence of MAD2, MAD7, ART2, ART11, or ART11 *. In certain embodiments the the nucleic acid-guided nuclease comprises an amino acid sequence that is at least 80, 85, 90, 95, 99, or 100% identical, preferably at least 90% identical, more preferably at least 95% identical to the amino acid sequence of SEQ ID NO: 37. For any nuclease, the nuclease may include at least one nuclear localization signal (NLS), at least one purification tag, or at least one cleavage site: it will be appreciated that the nuclease may include a purification tag which is removed by cleavage at the cleavage site. In certain embodiments the nuclease includes at least one, two, three, or four NLSs, preferably at least three, more preferably at least four, such as one N-terminal and three C-terminal NLS: this is merely exemplary and it will be appreciated that any combination can be used, e.g., all NLSs at the N-terminus. In preferred embodiments, the nucleic acid-guided nuclease comprises at least five NLS, which can be distributed in any suitable/desired combination of N- and C-terminus: in preferred embodiments, all at the N-terminus. Any suitable NLS or combination of NLSs can be used, in preferred embodiments one or more NLSs comprising any of SEQ ID NOs: 40-56, such as any of SEQ ID NOs: 40, 51, and 56. The guide nucleic acid (gNA), e.g., gRNA, can be any suitable gNA, e.g., gRNA, such as a sgRNA or dual gRNA, as appropriate for the nuclease used. In certain embodiments the gNA, e.g., gRNA, is a dual gNA, e.g., dual gRNA that is not found in natural systems that utilize the particular nuclease, e.g., a Type V-A nuclease, gRNAs can include one or more modified nucleotides, as described herein. The on-target site can be any suitable gene: specific genes can be as described herein. In general the gNA, e.g., gRNA, will comprise (A) a targeter nucleic acid comprising a targeter stem sequence and a spacer sequence; and (B) a modulator nucleic acid comprising a modulator stem sequence complementary to the targeter stem sequence, and, optionally, a 5′ sequence. In certain embodiments the gNA, e.g., gRNA, is an engineered, not naturally occurring gNA, e.g., gRNA. The gNA, e.g., gRNA, can comprise a single polynucleotide. In preferred embodiments the gNA, e.g., gRNA comprises a dual guide nucleic acid, wherein the targeter nucleic acid and the modulator nucleic acid are separate polynucleotides, the dual gNA is capable of binding to and activating a nucleic acid-guided nuclease, that, in a naturally occurring system, is activated by a single crRNA in the absence of a tracrRNA, e.g., a Type V-A nuclease. Any suitable spacer sequence may be used; in certain embodiments the spacer sequence comprises a spacer sequence of any one of SEQ ID NOs: 86-384 and 983-1798. In preferred embodiments, some or all of the gNA comprises RNA, e.g., at least 50%, at least 70%, at least 90%, at least 95%, or 100% of the gNA comprises RNA: in preferred embodiments the gNA is 100% RNA. The gNA, e.g., gRNA, can comprise one or more chemical modifications, such as one or more of a 2′-O-alkyl, a 2′-O-methyl, a phosphorothioate, a phosphonoacetate, a thiophosphonoacetate, a 2′-O-methyl-3′-phosphorothioate, a 2′-O-methyl-3′-phosphonoacetate, a 2′-O-methyl-3′-thiophosphonoacetate, a 2′-deoxy-3′-phosphonoacetate, a 2′-deoxy-3′-thiophosphonoacetate, or a combination thereof. One or more donor templates, e.g., for a mutation in a gene (e.g., a mutation in a PAM, and others as described herein), a transgene to be inserted, a wild-type gene, or other, as described herein, may be used. In certain embodiments, an ssODN that includes the donor template may be used, e.g., a single oligonucleotide comprising appropriate homology arms and the donor template. In other embodiments, two or more ssODNs may be used to provide a complete system for insertion, i.e., homology arms and donor template. In this case, a first ssODN can provide a first homology arm at the 3′ or 5′ end of the donor template, and also include a sequence complementary to a sequence at the 3′ or 5′ end of the donor template so that the two hybridize. In certain embodiments a second ssODN provides a second homology arm at the other end of the donor template, e.g., at the 5′ or 3′ end, and also include a sequence complementary to a sequence at the 5′ or 3′ end of the o the donor template so that the two hybridize. In certain embodiments provided is a kit comprising a composition of this paragraph. In certain embodiments provided is a cell comprising a composition of this paragraph. In certain embodiments provided herein is a method comprising introducing one or more of the compositions of this paragraph into a cell: any suitable method may be used. In a preferred embodiment electroporation is used. An HDR enhancer, e.g., M3814, and/or an anionic polymer, such as non-specific ssODNs or a peptide, e.g., poly-L-glutamic acid (PGA), both of which as described elsewhere herein, may be used. The cell can be any suitable cell, preferably a human cell, more preferably an immune or stem cell, as described below. Also provided is a cell comprising a composition of this paragraph, preferably a human cell, even more preferably a human immune cell or a human stem cell. Exemplary immune cells are a neutrophil, cosinophil, basophil, mast cell, monocyte, macrophage, dendritic cell, natural killer cell, or a lymphocyte: preferably a T cell, more preferably a CAR-T cell. Exemplary stem cells include a human pluripotent, multipotent stem cell, embryonic stem cell, induced pluripotent stem cell, or hematopoietic stem cell: preferably a CD34+ stem cell or an induced pluripotent stem cell (iPSC). In certain embodiments provided herein is a a method of cleaving at or near a target nucleic acid sequence which is at or near an on-target site within a target polynucleotide comprising contacting the target polynucleotide with any of the compositions of this paragraph that include the nucleic acid-guided nuclease complex, wherein the nucleic acid-guided nuclease complex cleaves at least one strand of the target polynucleotide within the on-target site. Also provided herein is a method of editing a genome of a eukaryotic cell comprising delivering any of the compositions of this paragraph that include the nucleic acid-guided nuclease complex into the eukaryotic cell, thereby resulting in editing of the genome of the eukaryotic cell. The composition may be transported into the cell by any suitable method, preferably electroporation. Also provided herein is a method of treating a disease or a disorder comprising administering to a subject in need thereof an effective amount of a composition of this paragraph that includes the nucleic acid-guided nuclease complex or an effective amount of cells modified by treatment with a composition of this paragraph that includes the nucleic acid-guided nuclease complex. Also provided is method of reducing a proportion of mutations in off-target sites in a genome of a cell comprising contacting the cell with a composition of this paragraph that includes the nucleic acid-guided nuclease complex, compared to the proportion if the composition is not used. The reduction can be at least 5, 10, 15, 20, 30, 40, 50, 60, 70, 80, 90, 95, or 99%, preferably at least 20%, more preferably at least 40%, even more preferably at least 60%. The method can also comprise increasing HDR and/or increasing viability and/or expansion capacity of the cells after editing. In certain embodiments provided herein is a method of both increasing HDR at an on-target site in a genome of a cell and decreasing mutations at one or more off-target sites in the genome of the cell comprising the cell with a composition of this paragraph that includes the nucleic acid-guided nuclease complex, thereby both increasing HDR at the on-target site and decreasing the proportion of mutations in off-target sites of the genome of the cell compared to the proportion if the composition is not used. The increase in HDR at the on-target site can be at least 5, 10, 15, 20, 30, 40, 50, 60, 70, 80, 90, 95, or 99%, preferably at least 20%, more preferably at least 40%, even more preferably at least 60%. The decrease in mutations in off-target sites of the genome can be at least 5, 10, 15, 20, 30, 40, 50, 60, 70, 80, 90, 95, or 99%, preferably at least 20%, more preferably at least 40%, even more preferably at least 60%.

[0045] In certain embodiments provided herein is a composition comprising (A) a nucleic acid-guided nuclease complex comprising a Type V nuclease and a compatible gNA, e.g., gRNA, wherein the the nucleic acid-guided nuclease complex specifically binds to a target nucleic acid sequence at or near an on-target site and cleaves at or near the target nucleic acid sequence to create a strand break in the on-target site; and (B) a first ssODN. It will be appreciated that a composition may instead provide one or more polynucleotides coding for one or both of the nuclease and the gNA, e.g., gRNA and that cellular machinery is relied on to provide the final nuclease and/or gNA, e.g., gRNA, and such embodiments are included herein wherever compositions and/or methods are described in terms of the nuclease and/or gNA. However, in preferred embodiments the nuclease and the gNA, e.g., gRNA, are provided as is, e.g., either delivered to a cell separately or, more preferably, combined to form a RNP in a form that can be transfected into the cell. Any suitable Type V nuclease complex and ssODN can be used. In certain embodiments, the first ssODN comprises a sequence that is complementary to a sequence flanking the strand break in the on-target site on the 3′ side of the strand break. Additionally or alternatively, the first ssODN can comprise a sequence that is complementary to a sequence flanking the strand break in the on-target site on the 5′ side of the strand break. In certain embodiments, the composition comprises a second ssODN, which can be the same as or different from the first ssODN, comprising a sequence that is complementary to a sequence flanking the strand break in the on-target site on the 5′ side of the strand break and/or on the 3″ side of the strand break. In certain embodiments at least a portion of the first and/or second ssODNs are capable of being integrated at or near the strand break. In certain embodiments the composition further comprises a donor template, which can be incorporated into an ssODN, or can be separate. One or more donor templates, e.g., for a mutation in a gene (e.g., a mutation in a PAM, and others as described herein), a transgene to be inserted, a wild-type gene, or other, as described herein, may be used. In certain embodiments, an ssODN that includes the donor template may be used, e.g., a single oligonucleotide comprising appropriate homology arms and the donor template. In other embodiments, two or more ssODNs may be used to provide a complete system for insertion, i.e., homology arms and donor template. In this case, a first ssODN can provide a first homology arm at the 3′ or 5′ end of the donor template, and also include a sequence complementary to a sequence at the 3′ or 5′ end of the donor template so that the two hybridize. In certain embodiments a second ssODN provides a second homology arm at the other end of the donor template, e.g., at the 5′ or 3′ end, and also include a sequence complementary to a sequence at the 5′ or 3′ end of the o the donor template so that the two hybridize. Generally, the the nucleic acid-guided nuclease complex also binds to one or more off-target nucleic acid sequences at or near one or more off-target sites and cleaves at or near the one or more off-target nucleic acid sequences to create a strand break in the one or more off-target sites. Thus, the composition may further comprise one or more ssODNs that are complementary to a sequence flanking the strand break in the one or more off-target sites, for example a plurality of ssODNs each of which comprises a different sequence complementary to sequences flanking the strand break in the different off-target sites, such as at least 1, 2, 3, 4, 5, 6, 7, 8, 9, 10, 20, 30, 40, 50, 60, 70, 80, 90, 100, 200, 300, 400, 500, 700, or 1000 and/or no more than 2, 3, 4, 5, 6, 7, 8, 9, 10, 20, 30, 40, 50, 60, 70, 80, 90, 100, 200, 300, 400, 500, 700, 1000 or 2000 ssODNs, preferably 10 to 1000 ssODNS, more preferably 100 to 1000 ssODNS, even more preferably 500 to 1000 ssODNs, each of which comprises a different sequence complementary to sequences flanking the strand break in the different off-target sites. In certain embodiments comprising off-target ssODNs, one or more of the ssODNs comprises s a mutation in the PAM, such as a synonymous mutation, as described elsewhere herein. In certain embodiments the Type V nuclease is a Type V-A, V-B, V-C, V-D, or V-E nuclease; in preferred embodiments the nuclease is a Type V-A nuclease. In a preferred embodiments the Type-V-A nuclease is a MAD, ART, or ABW nuclease. In more preferred embodiments Type-V-A nuclease is a MAD nuclease, such as a MAD1, MAD2, MAD3, MAD4, MAD5, MAD6, MAD7, MAD8, MAD9, MAD10, MAD1I, MAD12, MAD13, MAD14, MAD15, MAD16, MAD17, MAD18, MAD19, or MAD20 nuclease, preferably a MAD7 nuclease. In other embodiments the nuclease is a ART nuclease, such as an ART1, ART2, ART3, ART4, ART5, ART6, ART7, ART8, ART9, ART10, ART11, ART11*, ART12, ART13, ART14, ART15, ART16, ART17, ART18, ART19, ART20, ART21, ART22, ART23, ART24, ART25, ART26, ART27, ART28, ART29, ART30, ART31, ART32, ART33, ART34, or ART35 nuclease, preferably an ART2, ART11, or ART11* nuclease. In certain embodiments the nuclease has an amino acid sequence at least 80, 85, 90, 95, 99, or 100% % identical to the amino acid sequence of MAD2, MAD7, ART2, ART11, or ART11*. In certain embodiments the the nucleic acid-guided nuclease comprises an amino acid sequence that is at least 80, 85, 90, 95, 99, or 100% identical, preferably at least 90% identical, more preferably at least 95% identical to the amino acid sequence of SEQ ID NO: 37. For any nuclease, the nuclease may include at least one nuclear localization signal (NLS), at least one purification tag, or at least one cleavage site; it will be appreciated that the nuclease may include a purification tag which is removed by cleavage at the cleavage site. In certain embodiments the nuclease includes at least one, two, three, or four NLSs, preferably at least three, more preferably at least four, such as one N-terminal and three C-terminal NLS: this is merely exemplary and it will be appreciated that any combination can be used, e.g., all NLSs at the N-terminus. In preferred embodiments, the nucleic acid-guided nuclease comprises at least five NLS, which can be distributed in any suitable/desired combination of N- and C-terminus; in preferred embodiments, all at the N-terminus. Any suitable NLS or combination of NLSs can be used, in preferred embodiments one or more NLSs comprising any of SEQ ID NOs: 40-56, such as any of SEQ ID NOs: 40, 51, and 56. In general the gNA, e.g., gRNA, will comprise (A) a targeter nucleic acid comprising a targeter stem sequence and a spacer sequence; and (B) a modulator nucleic acid comprising a modulator stem sequence complementary to the targeter stem sequence, and, optionally, a 5′ sequence. In certain embodiments the gNA, e.g., gRNA, is an engineered, not naturally occurring gNA, e.g., gRNA. The gNA, e.g., gRNA, can comprise a single polynucleotide. In preferred embodiments the gNA, e.g., gRNA comprises a dual guide nucleic acid, wherein the targeter nucleic acid and the modulator nucleic acid are separate polynucleotides, the dual gNA is capable of binding to and activating a nucleic acid-guided nuclease, that, in a naturally occurring system, is activated by a single crRNA in the absence of a tracrRNA, e.g., a Type V-A nuclease. Any suitable spacer sequence may be used: in certain embodiments the spacer sequence comprises a spacer sequence of any one of SEQ ID NOs: 86-384 and 983-1798. In preferred embodiments, some or all of the gNA comprises RNA, e.g., at least 50%, at least 70%, at least 90%, at least 95%, or 100% of the gNA comprises RNA: in preferred embodiments the gNA is 100% RNA. The gNA, e.g., gRNA, can comprise one or more chemical modifications, such as one or more of a 2′-O-alkyl, a 2′-O-methyl, a phosphorothioate, a phosphonoacetate, a thiophosphonoacetate, a 2′-O-methyl-3′-phosphorothioate, a 2′-O-methyl-3′-phosphonoacetate, a 2′-O-methyl-3′-thiophosphonoacetate, a 2′-deoxy-3′-phosphonoacetate, a 2′-deoxy-3′-thiophosphonoacetate, or a combination thereof. The ssODN can be any suitable length, e.g., at least 100, 120, 140, 160, 180, 200, 220, 240, 260, 280, 300, 350, 400, 450, 500, or 1000 and/or not more than 120, 140, 160, 180, 200, 220, 240, 260, 280, 300, 350, 400, 450, 500, 1000, or 2000 nucleotides, for example 100-500 nucleotides. preferably 140-400 nucleotides. Each ssODN may be present in any suitable amount, e.g., at least 50, 60, 70, 80, 90, 100, 150, 200, 250, 300, 350, 400, 450, 500, 550, 600, 700, 800, or 900 and/or not more than 60, 70, 80, 90, 100, 150, 200, 250, 300, 350, 400, 450, 500, 550, 600, 700, 800, 900 or 1000 pmol of each ssODN, for example 50-1000 pmol of each ssODN. In certain embodiments provided herein is a method comprising introducing one or more of the compositions of this paragraph into a cell; any suitable method may be used. In a preferred embodiment electroporation is used. The method can include expaninding and/or differentiating the cell. An HDR enhancer, e.g., M3814, and/or an anionic polymer, such as non-specific ssODNs or a peptide, e.g., poly-L-glutamic acid (PGA), both of which as described elsewhere herein, may be used. The cell can be any suitable cell, preferably a human cell, more preferably an immune or stem cell, as described below. Also provided is a cell comprising a composition of this paragraph, preferably a human cell, even more preferably a human immune cell or a human stem cells. Exemplary immune cells are a neutrophil, eosinophil, basophil, mast cell, monocyte, macrophage, dendritic cell, natural killer cell, or a lymphocyte; preferably a T cell, more preferably a CAR-T cell. Exemplary stem cells include a human pluripotent, multipotent stem cell, embryonic stem cell, induced pluripotent stem cell, or hematopoietic stem cell; preferably a CD34+ stem cell or an induced pluripotent stem cell (iPSC)

[0046] In certain embodiments provided herein is a composition comprising a first single-ssODN comprising a sequence complementary to a nucleic acid sequence flanking the double stranded break at the on-target site flanking a double stranded break at an on-target site for a nucleic acid-guided nuclease complex; and a second ssODN comprising a sequence complementary to a nucleic acid sequence flanking a double stranded break at an off-target site (ssODN_{off}) for the nucleic acid-guided nuclease complex. The composition can further comprise the nucleic acid-guided nucleae complex. The composition can comprise, for each integer x representing an off-target site for the nucleic-acid guided nuclease complex, a (ssODN_{off})x wherein each (ssODN_{off})x comprises a sequence complementary to a nucleic acid sequence flanking a double stranded break at an off-target site (x). The number of different integers x can be any suitable number, e.g., at least 2, 3, 4, 5, 6, 7, 8, 9, 10, 20, 30, 40, 50, 60, 70, 80, 90, 100, 120, 140, 160, 180, 200, 250, 300, 350, 400, 450, 500, or 1000 and/or no more than 3, 4, 5, 6, 7, 8, 9, 10, 20, 30, 40, 50, 60, 70, 80, 90, 100, 120, 140, 160, 180, 200, 250, 300, 350, 400, 450, 500, 1000, or 2000, preferably 2-2000, more preferably 100-1000. In certain embodiments the ssODN comprising a sequence complementary to a nucleic acid sequence flanking a double stranded break at an on-target site comprises at least one mutation compared to the wildtype sequence at the on-target site, such as mutation comprising a SNP, an INDEL, and/or a missense mutation. In certain embodiments the ssODN or ssODNs comprising a sequence complementary to a nucleic acid sequence flanking a double stranded break at one or more off-target sites comprises the wildtype sequence for the one or more off-target sites. In certain embodiments the ssODN or ssODNS comprising a sequence complementary to a nucleic acid sequence flanking a double stranded break at one or more off-target sites comprises at least one mutation compared to the wildtype sequence at the one or more off-target sites, such as a synonymous mutation. In certain embodiments the mutation is in the PAM at the one or more off-target sites. In certain embodiments provided herein is a method comprising delivering a composition of this paragraph to a population of cells. The method can further comprise expanding and/or differentiating cells in the population of cells, for example, expanding, or differentiate then expand, or expanding then differentiating, then expanding. The method can produce a population of cells comprising a plurality of genotypes at the on-target site. Delivery can be by any suitable method, preferably electroporation. Nucleotide lengths of the ssODNs can be any suitable length, such as those described herein. Amounts and ratios of ssODNs may be any suitable ratios, also as described herein. In certain embodiments the gRNA is a single gRNA, in other embodiments the gRNA is a dual gRNA. In certain embodiments the gRNA comprises one or more modified nucleotides, as described herein. In certain embodiments, the gRNA targets a specific gene, as described herein. In certain embodiments, the Cas nuclease comprises a Type I, II, III, IV, V, or VI nuclease, in some cases a Type V nuclease, for example, a Type V-A, V-C, or V-D Cas nuclease, such as a Type VA nuclease, including but not limited to a Cpf1 nuclease, derivative, or variant: a MAD nuclease, derivative, or variant: a ART nuclease, derivative, or variant: a Csm1 nuclease, derivative, or variant: or an ABW nuclease, derivative, or variant: specific examples are provided herein.

[0047] In certain embodiments provided herein is a composition for integrating at least a portion of a donor template at or near a strand break at an on-target or off-target site in a genome of a cell comprising (A) a donor template lacking one or both homology arms complementary to a sequence or sequences flanking the strand break; and (B) a first ssODN comprising (i) a first portion comprising a sequence complementary to at least a 5′ or 3′ portion of the donor template, and (ii) a second portion comprising a sequence homologous to a sequence flanking the strand break. The composition can further comprise a second ssODN comprising (i) a first portion comprising a sequence complementary to at least a 5′ or 3′ portion of the donor template different from the first ssODN, and (ii) a second portion comprising a sequence homologous to a sequence flanking the strand break. Also provided herein is a method for integrating at least a portion of a donor template at a strand break in a target site in a genome of a cell comprising delivering to the cell a composition of this paragraph, and a nucleic acid guided nuclease complex comprising a nucleic acid-guided nuclease and a compatible gNA, e.g., gRNA, wherein the complex is capable of producing the strand break. The method can further comprise expanding and/or differentiating the cell. Suitable nucleases include any of the nucleases described herein, such as a Type V nuclease, preferably a Type V-A nuclease, such as a Type V-A nuclease as described in previous paragraphs. Suitable gNAs, e.g., gRNAs include any of the gNAs, e.g., gRNAs, described herein, preferably a dual gRNA, in certain embodiment with one or more chemical modifications, also as described herein.

[0048] In certain embodiments provided herein is a composition comprising a plurality of ssODNs comprising (A) a first ssODN comprising (i) a first portion comprising a sequence homologous to a sequence upstream of a target site in a genome of a target cell, and (ii) a second portion comprising a sequence comprising at least a portion of a heterologous sequence to be inserted into the genome of the target cell: (B) a second ssODN comprising (i) a first portion comprising a sequence homologous to a sequence downstream of a target site in a genome of a target cell, and (ii) a second portion comprising a sequence at least partially complementary to at least a portion of the heterologous sequence to be inserted into the genome of the target cell; and, optionally, (C) one or more additional ssODNs each comprising (i) a sequence comprising at least a portion of a heterologous sequence to be inserted into the genome of the target cell, and (ii) a second portion comprising a sequence at least partially complementary to at least a portion of the heterologous sequence to be inserted into the genome of the target cell: wherein the plurality of ssODNs comprises the entirety of heterologous sequence to be inserted into the genome of the target cell. The composition can further comprise a nucleic acid-guided nuclease complex comprising a nuclease and a gNA, e.g., gRNA. Suitable nucleases include any of the nucleases described herein, such as a Type V nuclease, preferably a Type V-A nuclease, such as a Type V-A nuclease as described in previous paragraphs. Suitable gNAs, e.g., gRNAs include any of the gNAs, e.g., gRNAs, described herein, preferably a dual gRNA, in certain embodiment with one or more chemical modifications, also as described herein. Also provided herein is a method for inserting a heterologous sequence at or near a target site in a genome of a cell comprising delivering a composition of this paragraph to the cell, where the composition includes a nucleic acid-guided nuclease complex capable of binding to the target site and cleaving at or near the target site. The method may further include expanding and/or differentiating the cell.

[0049] In certain embodiment provided herein is a method comprising contacting a population of cells with a composition comprising (A) a nucleic acid-guided nuclease complex comprising a nucleic acid-guided nuclease and a compatible gNA, wherein the complex can bind to and cleave at an on-target site and one or more off-target sites in the genomes of the cells in the population of cells. (B) a ssODN, and (C) one or more ssODNs for one or more of the off-target sites. Suitable nucleases include any of the nucleases described herein, such as a Type V nuclease, preferably a Type V-A nuclease, such as a Type V-A nuclease as described in previous paragraphs. Suitable gNAs, e.g., gRNAs include any of the gNAs, e.g., gRNAs, described herein, preferably a dual gRNA, in certain embodiment with one or more chemical modifications, also as described herein. The method can further comprise expanding and/or differentiating cells in the population of cells; in certain embodiments, at least 10, 20, 30, 40, 50, 60, 70, 80, 90, or 95%, preferably at least 20%, more preferably at least 40%, still more preferably at least 60%, of total genome edits at the target site occur through HDR. In certain embodiments a mutation rate at the one or more off-target sites is at least 10, 20, 30, 40, 50, 60, 70, 80, 90, or 95%, preferably at least 20%, more preferably at least 40%, still more preferably at least 60%, lower that that of the same population of cells treated with the composition lacking the one or more ssODNS for the one or more off-target sites.

[0050] In certain embodiment provided herein is a composition comprising (A) a guide RNA (gRNA) comprising (i) a first nucleotide sequence that hybridizes to a target nucleic acid sequence in a genome of a cell, and (ii) a second nucleotide sequence that interacts with a Cas nuclease: (B) the Cas nuclease, comprising an RNA-binding portion that interacts with the second nucleotide sequence of the guide RNA to form a ribonucleoprotein (RNP) complex, wherein the RNP complex (i) specifically binds to the target nucleic acid sequence at an on-target site and cleaves at or near the target nucleic acid sequence to create a double-stranded break in the on-target site, and (ii) also binds to one or more off-target nucleic acid sequences at one or more off-target sites and cleaves at or near the one or more off-target nucleic acid sequences to create a double-strand break in the one or more off-target sites: (C) a first, on-target ssODN comprising a sequence complementary to a sequence flanking the double stranded break in the on-target site, wherein the ssODN integrates into DNA in the on-target site; and (D) a second, off-target ssODN comprising a sequence complementary to a genomic sequence flanking a double stranded break in a first off-target site and integrates into the DNA in the off-target site, wherein the second ssODN comprises (i) homology arms for the off-target site that are more complementary to the genomic sequence at the off-target site than homology arms of the on-target ssODN. In certain embodiments the first ssODN comprises at least one nucleotide modification relative to nucleic acid sequence (native sequence) at the on-target site. In certain embodiments the second ssODN further comprises at least one mutation, e.g., synonymous mutation to reduce or eliminate re-cleavage at the off-target site following integration of the second ssODN, such as a mutation in a PAM sequence of the first off-target site. The composition can further comprise a nucleotide sequence to be inserted at the first off-target site that is identical to a wild-type gene at the first off-target site. The composition can further include a third, fourth, fifth, sixth, seventh, eight, ninth, and/or tenth ssODN, the ssODN(s) being for a second, third, fourth, fifth, sixth, seventh, eight, and/or ninth off-target site. In certain embodiments the gRNA is a dual gRNA. In certain embodiments one or more nucleotides of the gRNA is chemically modified, as described elsewhere herein. The gRNA can include any suitable spacer sequence, such as one of the spacer sequences described herein. In certain embodiments the nuclease is a Type V nuclease, such as a Type V-A, V-C, or V-D nuclease, preferably a Type V-A nuclease, such as Cpf1, MAD, Csm1, ART, or ABW nuclease, or derivative or variant thereof, as described more thoroughly elsewhere herein.

[0051] Generally, the homologous region(s) of a ssODN has at least 50% sequence identity to a genomic sequence with which recombination is desired. The homology arms are designed or selected such that they are capable of recombining with the nucleotide sequences flanking the target nucleotide sequence under intracellular conditions. In certain embodiments, where HDR of the non-target strand is desired, the ssODN comprises a first homology arm homologous to a sequence 5′ to the target nucleotide sequence and a second homology arm homologous to a sequence 3′ to the target nucleotide sequence. In certain embodiments, the first homology arm is at least 50% (e.g., at least 60%, at least 70%, at least 75%, at least 80%, at least 85%, at least 90%, at least 91%, at least 92%, at least 93%, at least 94%, at least 95%, at least 96%, at least 97%, at least 98%, at least 99%, or 100%) identical to a sequence 5′ to the target nucleotide sequence. In certain embodiments, the second homology arm is at least 50% (e.g., at least 60%, at least 70%, at least 75%, at least 80%, at least 85%, at least 90%, at least 91%, at least 92%, at least 93%, at least 94%, at least 95%, at least 96%, at least 97%, at least 98%, at least 99%, or 100%) identical to a sequence 3′ to the target nucleotide sequence. In certain embodiments, when the ssODN sequence and a polynucleotide comprising a target nucleotide sequence are optimally aligned, the nearest nucleotide of the ssODN is within about 1, 5, 10, 15, 20, 25, 50, 75, 100, 200, 300, 400, 500, 1000, 2000, 3000, 4000, or more nucleotides from the target nucleotide sequence.

[0052] In certain embodiments, the ssODN further comprises an engineered sequence not homologous to the sequence to be repaired. Such engineered sequence can harbor a barcode and/or a sequence capable of hybridizing with a ssODN-recruiting sequence disclosed herein.

[0053] As mentioned previously, in certain embodiments, the ssODN further comprises one or more mutations relative to the genomic sequence, wherein the one or more mutations reduce or prevent cleavage, by the same CRISPR-Cas system, of the ssODN or of a modified genomic sequence with at least a portion of the ssODN sequence incorporated. In certain embodiments, in the ssODN, the PAM adjacent to the target nucleotide sequence and recognized by the Cas nuclease is mutated to a sequence not recognized by the same Cas nuclease. In certain embodiments, in the ssODN, the target nucleotide sequence (e.g., the seed region) is mutated. In certain embodiments, the one or more mutations are silent with respect to the reading frame of a protein-coding sequence encompassing the mutated sites.

[0054] The ssODN can be introduced into a cell in linear or circular form. If introduced in linear form, the ends of the ssODN may be protected (e.g., from exonucleolytic degradation) by methods known to those of skill in the art. For example, one or more dideoxynucleotide residues are added to the 3′ terminus of a linear molecule and/or self-complementary oligonucleotides are ligated to one or both ends (see, for example, Chang et al. (1987) PROC. NATL. ACAD SCI USA, 84:4959; Nehls et al. (1996) SCIENCE, 272:886; see also the chemical modifications for increasing stability and/or specificity of RNA disclosed supra). Additional methods for protecting exogenous polynucleotides from degradation include, but are not limited to, addition of terminal amino group(s) and the use of modified internucleotide linkages such as, for example, phosphorothioates, phosphoramidates, and O-methyl ribose or deoxyribose residues. As an alternative to protecting the termini of a linear ssODN, additional lengths of sequence may be included outside of the regions of homology that can be degraded without impacting recombination.

[0055] A ssODN can be a component of a vector as described herein, contained in a separate vector, or provided as a separate polynucleotide, such as an oligonucleotide, linear polynucleotide, or synthetic polynucleotide. In certain embodiments, a ssODN is in the same nucleic acid as a sequence encoding the targeter nucleic acid, a sequence encoding the modulator nucleic acid, and/or a sequence encoding the Cas protein, where applicable. In certain embodiments, a ssODN is provided in a separate nucleic acid.

[0056] A ssODN can be introduced into a cell as an isolated nucleic acid. Alternatively, a ssODN can be introduced into a cell as part of a vector (e.g., a plasmid) having additional sequences such as, for example, replication origins, promoters and genes encoding antibiotic resistance, that are not intended for insertion into the DNA region of interest. Alternatively, a ssODN can be delivered by viruses (e.g., adenovirus, adeno-associated virus (AAV)). In certain embodiments, the ssODN is introduced as an AAV, e.g., a pseudotyped AAV. The capsid proteins of the AAV can be selected by a person skilled in the art based upon the tropism of the AAV and the target cell type. For example, in certain embodiments, ssODN is introduced into a hepatocyte as AAV8 or AAV9. In certain embodiments, the ssODN is introduced into a hematopoietic stem cell, a hematopoietic progenitor cell, or a T lymphocyte (e.g., CD8+T lymphocyte) as AAV6 or an AAVHSC (see, U.S. Pat. No. 9,890,396). It is understood that the sequence of a capsid protein (VP1, VP2, or VP3) may be modified from a wild-type AAV capsid protein, for example, having at least 50% (e.g., at least 60%, at least 70%, at least 75%, at least 80%, at least 85%, at least 90%, at least 91%, at least 92%, at least 93%, at least 94%, at least 95%, at least 96%, at least 97%, at least 98%, or at least 99%) sequence identity to a wild-type AAV capsid sequence.

[0057] The ssODN can be delivered to a cell (e.g., a primary cell) by various delivery methods, such as a viral or non-viral method disclosed herein. In certain embodiments, a non-viral ssODN is introduced into the target cell as a naked nucleic acid or in complex with a liposome or poloxamer. In certain embodiments, a non-viral ssODN is introduced into the target cell by electroporation. In other embodiments, a viral ssODN is introduced into the target cell by infection. The engineered, non-naturally occurring system can be delivered before, after, or simultaneously with the ssODN (see, International (PCT) Application Publication No. WO2017/053729). A skilled person in the art can choose proper timing based upon the form of delivery (consider, for example, the time needed for transcription and translation of RNA and protein components) and the half-life of the molecule(s) in the cell. In particular embodiments, where the modified guide CRISPR-Cas system, e.g., modified dual guide CRISPR-Cas system including the Cas protein is delivered by electroporation (e.g., as an RNP), the ssODN (e.g., as an AAV) is introduced into the cell within 4 hours (e.g., within 1, 2, 3, 4, 5, 6, 7, 8, 9, 10, 11, 12, 13, 14, 15, 16, 17, 18, 19, 20, 25, 30, 35, 40, 45, 50, 55, 60, 90, 120, 150, 180, 210, or 240 minutes) after the introduction of the engineered, non-naturally occurring system.

[0058] In certain embodiments, ssODN is conjugated covalently to the modulator nucleic acid. Covalent linkages suitable for this conjugation are known in the art and are described, for example, in U.S. Pat. No. 9,982,278 and Savic et al. (2018) ELIFE 7: e33761. In certain embodiments, the ssODN is covalently linked to the modulator nucleic acid (e.g., the 5′ end of the modulator nucleic acid) through an internucleotide bond. In certain embodiments, the ssODN is covalently linked to the modulator nucleic acid (e.g., the 5′ end of the modulator nucleic acid) through a linker.

[0059] In certain embodiments provided herein is a cell comprising any of the compositions of the preceding paragraphs. Accordingly, in another aspect, the present invention provides a cell comprising the non-naturally occurring system or a CRISPR expression system described herein. In certain embodiments, the cell is an immune cell. In certain embodiments, the cell is a T cell. In addition, the present invention provides a cell whose genome has been modified by the modified dual guide CRISPR-Cas system or complex disclosed herein.

[0060] The target cells can be mitotic or post-mitotic cells from any organism, such as a bacterial cell, an archaeal cell, a cell of a single-cell eukaryotic organism, a plant cell, an algal cell, e.g., Botryococcus braunii, Chlamydomonas reinhardtii, Nannochloropsis gaditana, Chlorella pyrenoidosa, Sargassum patens C. Agardh, and the like, a fungal cell (e.g., a yeast cell), an animal cell, a cell from an invertebrate animal (e.g. fruit fly, enidarian, cchinoderm, nematode, etc.), a cell from a vertebrate animal (e.g., fish, amphibian, reptile, bird, mammal), a cell from a mammal, a cell from a rodent, or a cell from a human. The types of target cells include but are not limited to a stem cell (e.g., an embryonic stem (ES) cell, an induced pluripotent stem (iPS) cell, a germ cell), a somatic cell (e.g., a fibroblast, a hematopoietic cell, a T lymphocyte (e.g., CD8+ T lymphocyte), an NK cell, a neuron, a muscle cell, a bone cell, a hepatocyte, a pancreatic cell), an in vitro or in vivo embryonic cell of an embryo at any stage (e.g., a 1-cell, 2-cell, 4-cell, 8-cell: stage zebrafish embryo). Cells may be from established cell lines or may be primary cells (i.e., cells and cells cultures that have been derived from a subject and allowed to grow in vitro for a limited number of passages of the culture). For example, primary cultures are cultures that may have been passaged within 0 times, 1 time, 2 times, 4 times, 5 times, 10 times, or 15 times, but not enough times to go through the crisis stage. Typically, the primary cell lines of the present invention are maintained for fewer than 10 passages in vitro. If the cells are primary cells, they may be harvested from an individual by any suitable method. For example, leukocytes may be harvested by apheresis, leukocytapheresis, or density gradient separation, while cells from tissues such as skin, muscle, bone marrow, spleen, liver, pancreas, lung, intestine, or stomach can be harvested by biopsy. The harvested cells may be used immediately, or may be stored under frozen conditions with a cryopreservative and thawed at a later time in a manner as commonly known in the art. In certain embodiments, provided herein is a method of treating a disease or disorder comprising administering to a subject in need thereof an effective amount of a composition as described in the previous paragraph, or an effective amount of cells modified as described in this paragraph. The disease or disorder can be any suitable disorder, such as a disease or disorder described herein.

[0061] An engineered, non-naturally occurring system disclosed herein can be delivered into a cell by suitable methods known in the art, including but not limited to ribonucleoprotein (RNP) delivery and “Cas RNA” delivery described below.

[0062] In certain embodiments, a guide RNA and a Cas protein can be combined into a RNP complex and then delivered into the cell as a pre-formed complex. This method is suitable for active modification of the genetic or epigenetic information in a cell during a limited time period. For example, where the Cas protein has nuclease activity to modify the genomic DNA of the cell, the nuclease activity only needs to be retained for a period of time to allow DNA cleavage, and prolonged nuclease activity may increase off-targeting. Similarly, certain epigenetic modifications can be maintained in a cell once established and can be inherited by daughter cells.

[0063] A “ribonucleoprotein” or “RNP,” as used herein, includes a complex comprising a nucleoprotein and a ribonucleic acid. A “nucleoprotein” as used herein includes a protein capable of binding a nucleic acid (e.g., RNA, DNA). Where the nucleoprotein binds a ribonucleic acid it is referred to as “ribonucleoprotein.” The interaction between the ribonucleoprotein and the ribonucleic acid may be direct, e.g., by covalent bond, or indirect, e.g., by non-covalent bond (e.g. electrostatic interactions (e.g. ionic bond, hydrogen bond, halogen bond), van der Waals interactions (e.g. dipole-dipole, dipole-induced dipole, London dispersion), ring stacking (pi effects), hydrophobic interactions, and the like). In certain embodiments, the ribonucleoprotein includes an RNA-binding motif non-covalently bound to the ribonucleic acid. For example, positively charged aromatic amino acid residues (e.g., lysine residues) in the RNA-binding motif may form electrostatic interactions with the negative nucleic acid phosphate backbones of the RNA.

[0064] To ensure efficient loading of the Cas protein, the targeter nucleic acid and the modulator nucleic acid can be provided in excess molar amount (e.g., about 2 fold, about 3 fold, about 4 fold, or about 5 fold) relative to the Cas protein. In certain embodiments, the targeter nucleic acid and the modulator nucleic acid are annealed under suitable conditions prior to complexing with the Cas protein. In other embodiments, the targeter nucleic acid, the modulator nucleic acid, and the Cas protein are directly mixed together to form an RNP.

[0065] A variety of delivery methods can be used to introduce an RNP disclosed herein into a cell. Exemplary delivery methods or vehicles include but are not limited to microinjection, liposomes (see, e.g., U.S. Patent Publication No. 2017/0107539) such as molecular trojan horses liposomes that delivers molecules across the blood brain barrier (see, Pardridge et al. (2010) COLD SPRING HARB. PROTOC., doi: 10.1101/pdb.prot5407), immunoliposomes, virosomes, microvesicles (e.g., exosomes and ARMMs), polycations, lipid: nucleic acid conjugates, electroporation, cell permeable peptides (see, U.S. Patent Publication No. 2018/0363009), nanoparticles, nanowires (see, Shalek et al. (2012) NANO LETTERS, 12:6498), exosomes, and perturbation of cell membrane (e.g., by passing cells through a constriction in a microfluidic system, see, U.S. Patent Publication No. 2018/0003696). In certain embodiments the delivery method is electroporation. Where the target cell is a proliferating cell, the efficiency of RNP delivery can be enhanced by cell cycle synchronization (see, U.S. Patent Publication No. 2018/0044700).

[0066] In other embodiments, a system is delivered into a cell in a “Cas RNA” approach, i.e., delivering a targeter nucleic acid, a modulator nucleic acid, and an RNA (e.g., messenger RNA (mRNA)) encoding a Cas protein. The RNA encoding the Cas protein can be translated in the cell and form a complex with the targeter nucleic acid and the modulator nucleic acid intracellularly. Similar to the RNP approach, RNAs have limited half-lives in cells, even though stability-increasing modification(s) can be made in one or more of the RNAs. Accordingly, the “Cas RNA” approach is suitable for active modification of the genetic or epigenetic information in a cell during a limited time period, such as DNA cleavage, and has the advantage of reducing off-targeting.

[0067] The mRNA can be produced by transcription of a DNA comprising a regulatory element operably linked to a Cas coding sequence. Given that multiple copies of Cas protein can be generated from one mRNA, the targeter nucleic acid and the modulator nucleic acid are generally provided in excess molar amount (e.g., at least 5 fold, at least 10 fold, at least 20 fold, at least 30 fold, at least 50 fold, or at least 100 fold) relative to the mRNA. In certain embodiments, the targeter nucleic acid and the modulator nucleic acid are annealed under suitable conditions prior to delivery into the cells. In other embodiments, the targeter nucleic acid and the modulator nucleic acid are delivered into the cells without annealing in vitro. In certain embodiments, a modified dual guide nucleic acid system is used. In certain embodiments, a modified single guide nucleic acid system is used.

[0068] A variety of delivery systems can be used to introduce an “Cas RNA” system into a cell. Non-limiting examples of delivery methods or vehicles include microinjection, biolistic particles, liposomes (see, e.g., U.S. Patent Publication No. 2017/0107539) such as molecular trojan horses liposomes that delivers molecules across the blood brain barrier (see, Pardridge et al. (2010) COLD SPRING HARB. PROTOC., doi:10.1101/pdb.prot5407), immunoliposomes, virosomes, polycations, lipid: nucleic acid conjugates, electroporation, nanoparticles, nanowires (see, Shalek et al. (2012) NANO LETTERS, 12:6498), exosomes, and perturbation of cell membrane (e.g., by passing cells through a constriction in a microfluidic system, see, U.S. Patent Publication No. 2018/0003696). Specific examples of the “nucleic acid only” approach by electroporation are described in International (PCT) Publication No. WO2016/164356.

[0069] In other embodiments, a composition is delivered into a cell in the form of a targeter nucleic acid, a modulator nucleic acid, and a DNA comprising a regulatory element operably linked to a Cas coding sequence. The DNA can be provided in a plasmid, viral vector, or any other form described in the “CRISPR Expression Systems” subsection. Such delivery method may result in constitutive expression of Cas protein in the target cell (e.g., if the DNA is maintained in the cell in an episomal vector or is integrated into the genome), and may increase the risk of off-targeting which is undesirable when the Cas protein has nuclease activity. Notwithstanding, this approach is useful when the Cas protein comprises a non-nuclease effector (e.g., a transcriptional activator or repressor). It is also useful for research purposes and for genome editing of plants.

[0070] In certain embodiments provided herein is a method of cleaving a target DNA having a target nucleotide sequence, the method comprising contacting the target DNA with a composition comprising (i) a guide RNA (gRNA) comprising (a) a first nucleotide sequence that hybridizes to the target DNA sequence in the genome of a cell, and (b) a second nucleotide sequence that interacts with a Cas nuclease; (ii) the Cas nuclease, comprising an RNA-binding portion that interacts with the second nucleotide sequence of the guide RNA to form a ribonucleoprotein (RNP) complex, wherein the RNP complex (a) specifically binds and cleaves the target DNA sequence to create a double-stranded break at an on-target site, and (b) potentially also binds and cleaves one or more non-target DNA sequences at one or more off-target sites; (iii) a ssODN comprising a sequence complementary to a nucleic acid sequence flanking a double stranded break at an on-target site for a nucleic acid-guided nuclease complex; and (iv) a ssODN comprising a sequence complementary to a nucleic acid sequence flanking a double stranded break at an off-target site (ssODN_{off}) for the nucleic acid-guided nuclease complex, wherein the second ssODN comprises (a) homology arms for the off-target site that are more complementary to the genomic sequence at the off-target site than homology arms of the on-target ssODN: thereby resulting in cleavage of the target DNA. The first ssODN can comprise at least one nucleotide modification relative to the target DNA sequence. The second ssODN can further comprise at least one synonymous mutation to prevent re-cleavage of the non-target DNA following incorporation of the second ssODN into the genome of the cell, such as a mutation in a PAM sequence of the first off-target site. The second ssODN can comprise a nucleotide sequence to be inserted at the off-target site that is identical to the wild-type gene at the first off-target site. The composition may further comprise additional off-target ssODNs, different from the second ssODN, for example, at least a third, fourth, fifth, sixth, seventh, eighth, ninth, tenth, ssODN, each of which targets a different off-target site and each of which has homology arms that are more specific to the genomic sequence at its particular off-target site than homology arms of the on-target ssODN. Further embodiments include even more off-target ssODNs, for example, at least 10, 12, 15, 17, 20, 25, 30, 35, 40, 45, 50, 60, 70, 80, 90, 100, 120, 150, or 200 different off-target ssODNs and/or not more than 12, 15, 17, 20, 25, 30, 35, 40, 45, 50, 60, 70, 80, 90, 100, 120, 150, 200 or 500 different off-target ssODNs. Nucleotide lengths of the ssODNs can be any suitable length, such as those described herein. Ratios of ssODNs may be any suitable ratios, also as described herein. In certain embodiments the gRNA is a single gRNA, in other embodiments the gRNA is a dual gRNA. In certain embodiments the gRNA comprises one or more modified nucleotides, as described herein. In certain embodiments, the gRNA targets a specific gene, as described herein. In certain embodiments, the Cas nuclease comprises a Type I, II, III, IV, V, or VI nuclease, in some cases a Type V nuclease, for example, a Type V-A, V-C, or V-D Cas nuclease, such as a Type VA nuclease, including but not limited to a Cpf1 nuclease, derivative, or variant; a MAD nuclease, derivative, or variant: a ART nuclease, derivative, or variant; a Csm1 nuclease, derivative, or variant; or an ABW nuclease, derivative, or variant; specific examples are provided herein.

[0071] In certain embodiments, provided herein is a method of reducing the proportion of mutations in off-target sites compared to an on-target site comprising a target DNA sequence in a genome of a cell comprising contacting the cell with a composition comprising (i) a guide RNA (gRNA) comprising (a) a first nucleotide sequence that hybridizes to the target DNA sequence, and (b) a second nucleotide sequence that interacts with a Cas nuclease: (ii) the Cas nuclease, comprising an RNA-binding portion that interacts with the second nucleotide sequence of the guide RNA to form a ribonucleoprotein (RNP) complex, wherein the RNP complex (a) specifically binds and cleaves the target DNA sequence to create a double-stranded break at the on-target site, and (b) potentially also binds and cleaves one or more non-target DNA sequences at one or more off-target sites; (iii) a first single-stranded DNA oligonucleotide (ssODN) that is complementary to and hybridizes with a genomic sequence flanking the double stranded break at the on-target site and integrates into DNA at the on-target site; and (iv) a second ssODN that comprises a sequence that is complementary to and hybridizes with a genomic sequence flanking a double stranded break, if present, at a first off-target site and integrates into the DNA at the off-target site, wherein the second ssODN comprises (a) homology arms for the off-target site that are more complementary to the genomic sequence at the off-target site than homology arms of the on-target ssODN: thereby reducing the proportion of mutations in off-target sites of the genome of the cell compared to the proportion if the composition is not used, e.g., if a composition comprising the on-target materials but not the off-target materials is used. The first ssODN can comprise at least one nucleotide modification relative to the target DNA sequence. The second ssODN can further comprise at least one synonymous mutation to prevent re-cleavage of the non-target DNA following incorporation of the second ssODN into the genome of the cell, such as a mutation in a PAM sequence of the first off-target site. The second ssODN can comprise a nucleotide sequence to be inserted at the off-target site that is identical to the wild-type gene at the first off-target site. The composition may further comprise additional off-target ssODNs, different from the second ssODN, for example, at least a third, fourth, fifth, sixth, seventh, eighth, ninth, tenth, ssODN, each of which targets a different off-target site and each of which has homology arms that are more specific to the genomic sequence at its particular off-target site than homology arms of the on-target ssODN. Further embodiments include even more off-target ssODNs, for example, at least 10, 12, 15, 17, 20, 25, 30, 35, 40, 45, 50, 60, 70, 80, 90, 100, 120, 150, or 200 different off-target ssODNs and/or not more than 12, 15, 17, 20, 25, 30, 35, 40, 45, 50, 60, 70, 80, 90, 100, 120, 150, 200 or 500 different off-target ssODNs. Nucleotide lengths of the ssODNs can be any suitable length, such as those described herein. Ratios of ssODNs may be any suitable ratios, also as described herein. In certain embodiments the gRNA is a single gRNA, in other embodiments the gRNA is a dual gRNA. In certain embodiments the gRNA comprises one or more modified nucleotides, as described herein. In certain embodiments, the gRNA targets a specific gene, as described herein. In certain embodiments, the Cas nuclease comprises a Type I, II, III, IV, V, or VI nuclease, in some cases a Type V nuclease, for example, a Type V-A, V-C, or V-D Cas nuclease, such as a Type VA nuclease, including but not limited to a Cpf1 nuclease, derivative, or variant; a MAD nuclease, derivative, or variant; a ART nuclease, derivative, or variant; a Csm1 nuclease, derivative, or variant; or an ABW nuclease, derivative, or variant; specific examples are provided herein.

[0072] It will be appreciated that the methods and compositions provided herein increase the proportion of HDR compared to NHEJ in a genome, while also decreasing the amount of off-target mutations. In addition, or alternatively, the methods and compositions provided herein can also increase the viability/expansion capacity of cells after editing. Thus, provided herein is a method of both increasing HDR at an on-target site in a genome of a cell and decreasing mutations at one or more off-target sites in the genome of the cell comprising contacting the cell with a composition comprising (i) a guide RNA (gRNA) comprising (a) a first nucleotide sequence that hybridizes to the target DNA sequence, and (b) a second nucleotide sequence that interacts with a Cas nuclease; (ii) the Cas nuclease, comprising an RNA-binding portion that interacts with the second nucleotide sequence of the guide RNA to form a ribonucleoprotein (RNP) complex, wherein the RNP complex (a) specifically binds and cleaves the target DNA sequence to create a double-stranded break at the on-target site, and (b) potentially also binds and cleaves one or more non-target DNA sequences at one or more off-target sites; (iii) a first single-stranded DNA oligonucleotide (ssODN) that is complementary to and hybridizes with a genomic sequence flanking the double stranded break at the on-target site and integrates into DNA at the on-target site; and (iv) a second ssODN that comprises a sequence that is complementary to and hybridizes with a genomic sequence flanking a double stranded break, if present, at a first off-target site and integrates into the DNA at the off-target site, wherein the second ssODN comprises (a) homology arms for the off-target site that are more complementary to the genomic sequence at the off-target site than homology arms of the on-target ssODN; thereby both increasing HDR at the on-target site and decreasing the proportion of mutations in the off-target site of the genome of the cell compared to if the composition is not used, e.g., if a composition comprising the on-target materials but not the off-target materials is used. The first ssODN can comprise at least one nucleotide modification relative to the target DNA sequence. The second ssODN can further comprise at least one synonymous mutation to prevent re-cleavage of the non-target DNA following incorporation of the second ssODN into the genome of the cell, such as a mutation in a PAM sequence of the first off-target site. The second ssODN can comprise a nucleotide sequence to be inserted at the off-target site that is identical to the wild-type gene at the first off-target site. The composition may further comprise additional off-target ssODNs, different from the second ssODN, for example, at least a third, fourth, fifth, sixth, seventh, eighth, ninth, tenth, ssODN, each of which targets a different off-target site and each of which has homology arms that are more specific to the genomic sequence at its particular off-target site than homology arms of the on-target ssODN. Further embodiments include even more off-target ssODNs, for example, at least 10, 12, 15, 17, 20, 25, 30, 35, 40, 45, 50, 60, 70, 80, 90, 100, 120, 150, or 200 different off-target ssODNs and/or not more than 12, 15, 17, 20, 25, 30, 35, 40, 45, 50, 60, 70, 80, 90, 100, 120, 150, 200 or 500 different off-target ssODNs. Nucleotide lengths of the ssODNs can be any suitable length, such as those described herein. Ratios of ssODNs may be any suitable ratios, also as described herein. In certain embodiments the gRNA is a single gRNA, in other embodiments the gRNA is a dual gRNA. In certain embodiments the gRNA comprises one or more modified nucleotides, as described herein. In certain embodiments, the gRNA targets a specific gene, as described herein. In certain embodiments, the Cas nuclease comprises a Type I, II, III, IV, V, or VI nuclease, in some cases a Type V nuclease, for example, a Type V-A. V-C, or V-D Cas nuclease, such as a Type VA nuclease, including but not limited to a Cpf1 nuclease, derivative, or variant; a MAD nuclease, derivative, or variant; a ART nuclease, derivative, or variant; a Csm1 nuclease, derivative, or variant; or an ABW nuclease, derivative, or variant; specific examples are provided herein.

[0073] In certain embodiments, the engineered, non-naturally occurring system has high efficiency. For example, in certain embodiments, at least 10%, at least 20%, at least 30%, at least 40%, at least 50%, at least 60%, at least 70%, at least 75%, at least 80%, at least 85%, at least 90%, at least 91%, at least 92%, at least 93%, at least 94%, at least 95%, at least 96%, at least 97%, at least 98%, or at least 99% of a population of nucleic acids having the target nucleotide sequence and a cognate PAM, when contacted with the engineered, non-naturally occurring system, is targeted, cleaved, or modified. In certain embodiments, the genomes of at least 10%, at least 20%, at least 30%, at least 40%, at least 50%, at least 60%, at least 70%, at least 75%, at least 80%, at least 85%, at least 90%, at least 91%, at least 92%, at least 93%, at least 94%, at least 95%, at least 96%, at least 97%, at least 98%, or at least 99% of a population of cells, when contacted with the engineered, non-naturally occurring system, are targeted, cleaved, or modified.

[0074] It has been observed that the occurrence of on-target events and the occurrence of off-target events are generally correlated. For certain therapeutic purposes, low on-target efficiency can be tolerated and low off-target frequency is more desirable. For example, when editing or modifying a proliferating cell that will be delivered to a subject and proliferate in vivo, tolerance to off-target events is low. Prior to delivery, however, it is possible to assess the on-target and off-target events, thereby selecting one or more colonies that have the desired edit or modification and lack any undesired edit or modification.

[0075] The methods disclosed herein can be suitable for such use. In certain embodiments, when a population of nucleic acids having the target nucleotide sequence and a cognate PAM is contacted with one of the engineered, non-naturally occurring systems disclosed herein, the frequency of off-target events (e.g., targeting, cleavage, or modification, depending on the function of the CRISPR-Cas system) is reduced by at least 50%, at least 60%, at least 70%, at least 75%, at least 80%, at least 85%, at least 90%, at least 91%, at least 92%, at least 93%, at least 94%, at least 95%, at least 96%, at least 97%, at least 98%, or at least 99% relative to the frequency of off-target events when using the corresponding CRISPR system not containing off-target ssODNs under the same conditions. In certain embodiments, when genomic DNA having the target nucleotide sequence and a cognate PAM is contacted with one of the engineered, non-naturally occurring systems disclosed herein in a population of cells, the frequency of off-target events (e.g., targeting, cleavage, or modification, depending on the function of the CRISPR-Cas system) is reduced by at least 50%, at least 60%, at least 70%, at least 75%, at least 80%, at least 85%, at least 90%, at least 91%, at least 92%, at least 93%, at least 94%, at least 95%, at least 96%, at least 97%, at least 98%, or at least 99% % relative to the frequency of off-target events when using the corresponding CRISPR system not containing off-target ssODN under the same conditions. In certain embodiments, when delivered into a population of cells comprising genomic DNA having the target nucleotide sequence and a cognate PAM, the frequency of off-target events (e.g., targeting, cleavage, or modification, depending on the function of the CRISPR-Cas system) in the cells receiving one of the engineered, non-naturally occurring systems disclosed herein is reduced by at least 50%, at least 60%, at least 70%, at least 75%, at least 80%, at least 85%, at least 90%, at least 91%, at least 92%, at least 93%, at least 94%, at least 95%, at least 96%, at least 97%, at least 98%, or at least 99% % relative to the frequency of off-target events when using the corresponding CRISPR system not containing off-target ssODN under the same conditions. Methods of assessing off-target events were summarized in Lazzarotto et al. (2018) NAT PROTOC. 13 (11): 2615-42, and include discovery of in situ Cas off-targets and verification by sequencing (DISCOVER-seq) as disclosed in Wienert et al. (2019) SCIENCE 364 (6437): 286-89: genome-wide unbiased identification of double-stranded breaks (DSBs) enabled by sequencing (GUIDE-seq) as disclosed in Kleinstiver et al. (2016) NAT. BIOTECH. 34:869-74; circularization for in vitro reporting of cleavage effects by sequencing (CIRCLE-seq) as described in Kocak et al. (2019) NAT. BIOTECH. 37:657-66. In certain embodiments, the off-target events include targeting, cleavage, or modification at a given off-target locus (e.g., the locus with the highest occurrence of off-target events detected). In certain embodiments, the off-target events include targeting, cleavage, or modification at all the loci with detectable off-target events, collectively.

[0076] A composition comprising ssODNs as described herein, may be delivered to a cell by introducing a pre-formed ribonucleoprotein (RNP) complex into the cell. Alternatively, one or more components may be expressed in the cell: it will be appreciated that segments containing modified nucleotides should be introduced into the cells, but unmodified segments can be expressed in the cell. Exemplary methods of delivery are known in the art and described in, for example, U.S. Pat. Nos. 10,113,167 and 8,697,359 and U.S. Patent Application Publication Nos. 2015/0344912, 2018/0044700, 2018/0003696, 2018/0119140, 2017/0107539, 2018/0282763, and 2018/0363009.

[0077] It is understood that contacting a DNA (e.g., genomic DNA) in a cell with a composition comprising an ssODN as described herein does not require delivery of all components of the complex into the cell. For examples, one or more of the components may be pre-existing in the cell. In certain embodiments, the cell (or a parental/ancestral cell thereof) has been engineered to express the Cas protein, and the targeter nucleic acid (or a nucleic acid comprising a regulatory element operably linked to a nucleotide sequence encoding the targeter nucleic acid) and the modulator nucleic acid (or a nucleic acid comprising a regulatory element operably linked to a nucleotide sequence encoding the modulator nucleic acid) are delivered into the cell, in some cases, where one or the other, or both, contains one or more modified nucleotides at the 3′ and/or 5′ ends. In certain embodiments, the cell (or a parental/ancestral cell thereof) has been engineered to express the modulator nucleic acid, and the Cas protein (or a nucleic acid comprising a regulatory element operably linked to a nucleotide sequence encoding the Cas protein) and the targeter nucleic acid (or a nucleic acid comprising a regulatory element operably linked to a nucleotide sequence encoding the targeter nucleic acid) are delivered into the cell, in some cases where the targeter nucleic acid contains one or more modified nucleotides at the 3′ and/or 5′ ends. In certain embodiments, the cell (or a parental/ancestral cell thereof) has been engineered to express the Cas protein and the targeter nucleic acid, and the modulator nucleic acid (or a nucleic acid comprising a regulatory element operably linked to a nucleotide sequence encoding the modulator nucleic acid) is delivered into the cell, in some cases, where the modulator nucleic acid contains one or more modified nucleotides at the 3′ and/or 5′ ends.

[0078] In certain embodiments, the target DNA is in the genome of a target.

### II. High Efficiency Transgene Insertion

[0079] Recent advances have been made in precise genome targeting technologies. For example, specific loci in genomic DNA can be targeted, edited, or otherwise modified by designer meganucleases, zinc finger nucleases, or transcription activator-like effectors (TALEs). Furthermore, the CRISPR-Cas systems of bacterial and archaeal adaptive immunity have been adapted for precise targeting of genomic DNA in eukaryotic cells. Compared to the earlier generations of genome editing tools, the CRISPR-Cas systems are easy to set up, scalable, and amenable to targeting multiple positions within the eukaryotic genome, thereby providing a major resource for new applications in genome engineering. In certain embodiments, provided herein are compositions, methods, and/or kits for genome engineering. In certain embodiments, provided herein are compositions, methods, and/or kits for genome engineering of eukaryotic cells. In certain embodiments, provided herein are compositions, methods, and/or kits for genome engineering of human cells. In certain embodiments, provided herein are compositions, methods, and/or kits for genome engineering of human immune or stem cells. In certain embodiments, provided herein are compositions, methods, and/or kits for efficient genome engineering. In certain embodiments, provided herein are compositions, methods, and/or kits for efficient genome engineering via optimized compositions and/or methods. In certain embodiments, provided herein are compositions, methods, and/or kits comprising nucleases. In certain embodiments, provided herein are compositions, methods, and/or kits comprising nucleic acid-guided nucleases, e.g., CRISPR-cas nucleases. In certain embodiments, provided herein are compositions, methods, and/or kits comprising guide nucleic acids (gNAs). In certain embodiments, provided herein are compositions, methods, and/or kits comprising molecules that improve the efficiency of genome editing. In certain embodiments, provided herein are compositions, methods, and/or kits comprising molecules that stabilize RNPs, e.g., RNP stabilizer. In certain embodiments, provided herein are compositions, methods, and/or kits comprising molecules that inhibit non-homologous end joining (NHEJ), e.g., NHEJ inhibitor. In certain embodiments, provided herein are compositions, methods, and/or kits comprising improved combinations and/or concentrations of one or more of the following items: (1) one or more guide nucleic acids (gNA), (2) one or more nucleases, (3) one or more donor templates, (4) one or more RNP stabilizers, (5) one or more NHEJ inhibitors, (6) one or more cell growth and/or recovery mediums, and/or (7) one or more human target cells.

[0080] In certain embodiments, provided herein are compositions, methods, and/or kits comprising at least one of the seven items. In certain embodiments, provided herein are compositions, methods, and/or kits comprising at least two of the seven items. In certain embodiments, provided herein are compositions, methods, and/or kits comprising at least three of the seven items. In certain embodiments, provided herein are compositions, methods, and/or kits comprising at least four of the seven items. In certain embodiments, provided herein are compositions, methods, and/or kits comprising at least five of the seven items. In certain embodiments, provided herein are compositions, methods, and/or kits comprising at least six of the seven items. In certain embodiments, provided herein are compositions, methods, and/or kits comprising all seven items.

[0081] In certain embodiments, provided herein are compositions, methods, and/or kits comprising one or more nucleic acid guided nucleases, i.e., nuclease. In certain embodiments, provided herein are compositions, methods, and/or kits comprising one or more nucleases that further comprise at least one of the six additional items. In certain embodiments, provided herein are compositions, methods, and/or kits comprising one or more nucleases that further comprise at least two of the six additional items. In certain embodiments, provided herein are compositions, methods, and/or kits comprising one or more nucleases that further comprise at least three of the six additional items. In certain embodiments, provided herein are compositions, methods, and/or kits comprising one or more nucleases that further comprise at least four of the six additional items. In certain embodiments, provided herein are compositions, methods, and/or kits comprising one or more nucleases that further comprise at least five of the six additional items. In certain embodiments, provided herein are compositions, methods, and/or kits comprising one or more nucleases that further comprise all six additional items.

[0082] In certain embodiments, provided herein are compositions, methods, and/or kits comprising one or more guide nucleic acids. In certain embodiments, provided herein are compositions, methods, and/or kits comprising one or more guide nucleic acids that further comprise at least one of the six additional items. In certain embodiments, provided herein are compositions, methods, and/or kits comprising one or more guide nucleic acids that further comprise at least two of the six additional items. In certain embodiments, provided herein are compositions, methods, and/or kits comprising one or more guide nucleic acids that further comprise at least three of the six additional items. In certain embodiments, provided herein are compositions, methods, and/or kits comprising one or more guide nucleic acids that further comprise at least four of the six additional items. In certain embodiments, provided herein are compositions, methods, and/or kits comprising one or more guide nucleic acids that further comprise at least five of the six additional items. In certain embodiments, provided herein are compositions, methods, and/or kits comprising one or more guide nucleic acids that further comprise all six additional items.

[0083] In certain embodiments, provided herein are compositions, methods, and/or kits comprising one or more guide nucleic acids and one or more nucleases. In certain embodiments, provided herein are compositions, methods, and/or kits comprising one or more guide nucleic acids and one or more nucleases that further comprise at least one of the five additional items. In certain embodiments, provided herein are compositions, methods, and/or kits comprising one or more guide nucleic acids and one or more nucleases that further comprise at least two of the five additional items. In certain embodiments, provided herein are compositions, methods, and/or kits comprising one or more guide nucleic acids and one or more nucleases that further comprise at least three of the five additional items. In certain embodiments, provided herein are compositions, methods, and/or kits comprising one or more guide nucleic acids and one or more nucleases that further comprise at least four of the five additional items. In certain embodiments, provided herein are compositions, methods, and/or kits comprising one or more guide nucleic acids and one or more nucleases that further comprise all five additional items.

[0084] In certain embodiments, provided herein are compositions, methods, and/or kits comprising one or more guide nucleic acids and one or more RNP stabilizers. In certain embodiments, provided herein are compositions, methods, and/or kits comprising one or more guide nucleic acids and one or more RNP stabilizers that further comprise at least one of the five additional items. In certain embodiments, provided herein are compositions, methods, and/or kits comprising one or more guide nucleic acids and one or more RNP stabilizers that further comprise at least two of the five additional items. In certain embodiments, provided herein are compositions, methods, and/or kits comprising one or more guide nucleic acids and one or more RNP stabilizers that further comprise at least three of the five additional items. In certain embodiments, provided herein are compositions, methods, and/or kits comprising one or more guide nucleic acids and one or more RNP stabilizers that further comprise at least four of the five additional items. In certain embodiments, provided herein are compositions, methods, and/or kits comprising one or more guide nucleic acids and one or more RNP stabilizers that further comprise all five additional items.

[0085] In certain embodiments, provided herein are compositions, methods, and/or kits comprising one or more guide nucleic acids, one or more RNP stabilizers, and one or more nucleases. In certain embodiments, provided herein are compositions, methods, and/or kits comprising one or more guide nucleic acids, one or more RNP stabilizers, and one or more nucleases that further comprise at least one of the four additional items. In certain embodiments, provided herein are compositions, methods, and/or kits comprising one or more guide nucleic acids, one or more RNP stabilizers, and one or more nucleases that further comprise at least two of the four additional items. In certain embodiments, provided herein are compositions, methods, and/or kits comprising one or more guide nucleic acids, one or more RNP stabilizers, and one or more nucleases that further comprise at least three of the four additional items. In certain embodiments, provided herein are compositions, methods, and/or kits comprising one or more guide nucleic acids, one or more RNP stabilizers, and one or more nucleases that further comprise all four additional items.

[0086] In certain embodiments, provided herein are compositions, methods, and/or kits comprising one or more human target cells. In certain embodiments, provided herein are compositions, methods, and/or kits comprising one or more human target cells that further comprise at least one of the six additional items. In certain embodiments, provided herein are compositions, methods, and/or kits comprising one or more human target cells that further comprise at least two of the six additional items. In certain embodiments, provided herein are compositions, methods, and/or kits comprising one or more human target cells that further comprise at least three of the six additional items. In certain embodiments, provided herein are compositions, methods, and/or kits comprising one or more human target cells that further comprise at least four of the six additional items. In certain embodiments, provided herein are compositions, methods, and/or kits comprising one or more human target cells that further comprise at least five of the six additional items. In certain embodiments, provided herein are compositions, methods, and/or kits comprising one or more human target cells that further comprise all six additional items.

[0087] In certain embodiments, provided herein are compositions, methods, and/or kits comprising one or more human target cells and one or more NHEJ inhibitor. In certain embodiments, provided herein are compositions, methods, and/or kits comprising one or more human target cells and one or more NHEJ inhibitor that further comprise at least one of the five additional items. In certain embodiments, provided herein are compositions, methods, and/or kits comprising one or more human target cells and one or more NHEJ inhibitor that further comprise at least two of the five additional items. In certain embodiments, provided herein are compositions, methods, and/or kits comprising one or more human target cells and one or more NHEJ inhibitor that further comprise at least three of the five additional items. In certain embodiments, provided herein are compositions, methods, and/or kits comprising one or more human target cells and one or more NHEJ inhibitor that further comprise at least four of the five additional items. In certain embodiments, provided herein are compositions, methods, and/or kits comprising one or more human target cells and one or more NHEJ inhibitor that further comprise all five additional items.

[0088] In certain embodiments, provided herein are compositions, methods, and/or kits comprising one or more guide nucleic acids, one or more nucleases, and one or more human target cells. In certain embodiments, provided herein are compositions, methods, and/or kits comprising one or more guide nucleic acids, one or more nucleases, and one or more human target cells that further comprise at least one of the four additional items. In certain embodiments, provided herein are compositions, methods, and/or kits comprising one or more guide nucleic acids, one or more nucleases, and one or more human target cells that further comprise at least two of the four additional items. In certain embodiments, provided herein are compositions, methods, and/or kits comprising one or more guide nucleic acids, one or more nucleases, and one or more human target cells that further comprise at least three of the four additional items. In certain embodiments, provided herein are compositions, methods, and/or kits comprising one or more guide nucleic acids, one or more nucleases, and one or more human target cells that further comprise all four additional items. In certain embodiments comprising one or more nucleases, and one or more human target cells, the compositions, methods, and/or kits further can comprise one or more RNP stabilizers, one or more donor templates, and/or one or more NHEJ inhibitors

[0089] In certain embodiments, provide herein are compositions, methods, and/or kits wherein the optimized combinations and/or concentrations, e.g., condition and/or treatment, of gNA, nuclease, donor template, RNP stabilizers, and/or NHEJ inhibitors result in at least 1.1, 1.15, 1.2, 1.25, 1.3, 1.35, 1.4, 1.45, 1.5, 1.55, 1.6, 1.65, 1.7, 1.75, 1.8, 1.85, 1.9, 1.95, 2, 2.25, 2.5, 2.75, 3, 4, 5, 6, 7, 8, or 9-fold and/or not more than 1.15, 1.2, 1.25, 1.3, 1.35, 1.4, 1.45, 1.5, 1.55, 1.6, 1.65, 1.7, 1.75, 1.8, 1.85, 1.9, 1.95, 2, 2.25, 2.5, 2.75, 3, 4, 5, 6, 7, 8, 9, or 10-fold increased editing via homology directed repair (HDR) as compared to editing via NHEJ, for example 1.1-10-fold increased editing, preferably 1.1-5-fold increased editing, even more preferably 1.1-3-fold increased editing, yet more preferably 1.1-2-fold increased editing.

[0090] In certain embodiments, provided herein are compositions, methods, and/or kits comprising one or more additives that stabilize RNPs, e.g., RNP stabilizer. In certain embodiments, the one or more additives that stabilize RNPs are combined with the nuclease and the guide nucleic acid. In certain embodiments, the one or more additives that stabilize RNPs are combined with the guide nucleic acid prior to combination with the nuclease. In certain embodiments, the one or more additives that stabilize RNPs are combined with the nuclease prior to combination with the guide nucleic acid. In certain embodiments, the one or more additives that stabilize RNPs are combined with the pre-formed RNP complex comprising one or more nucleases and a guide nucleic acid. In certain embodiments, the one or more additives that stabilize RNPs prevent aggregation and/or support dispersion of RNP complexes in a population of RNPs.

[0091] In certain embodiments, an RNP stabilizer may comprise any suitable protein stabilizer, such as a protein stabilizer known in the art. In certain embodiments, an RNP stabilizer comprises 1,2,3-heptanetriol, 2-Amino-2-(hydroxymethyl)-1,3-propanediol (Tris), 3-(1-pyridino)-1-propane sulfonate (NDSB 201), 3-[(3-cholamidopropyl) dimethylammonio]-1-propanesulfonate (CHAPS), 6-aminocaproic acid, adenosine diphosphate (ADP), adenosine triphosphate (ATP), alpha-cyclodextrin, amidosulfobetaine-14 (ASB-14), ammonium acetate, ammonium nitrate, ammonium sulfate, arginine, arginine ethylester, barium chloride, barium iodide, benzamidine HCl, beta-cyclodextrin, beta-mercaptocthanol (BME), biotin, calcium chloride, cesium chloride, cesium sulfate, cetyltrimethylammonium bromide (CTAB), choline chloride, citric acid, cobalt chloride, copper (II) chloride, cyclohexanol, D-sorbitol, dimethylethylammoniumpropane sulfonate (NDSB 195), dithiothritol (DTT), erythritol, ethanol, ethylene glycol, ethylene glycol-bis (βbeta-aminoethyl ether)-N,N,N′,N′-tetraacetic acid (EGTA), ethylenediaminetetraacetic acid (EDTA), formamide, gadolinium bromide, gamma butyrolactone, glucose, glutamic acid, glutamine, glycerol, glycine, glycine betaine, glycine-glycine-glycine, guanidine HCl, guanosine triphosphate (GTP), holmium chloride, imidazole, iron (III) chloride, Jeffamine M-600, lanthanum acetate, lauryl sulfobetaine, lauryldimethylamine N-oxide (LDAO), lithium sulfate, magnesium chloride, magnesium sulfate, manganese chloride, mannitol, N-(2-hydroxyethyl) piperazine-N′-(3-propanesulfonic acid) (EPPS), N-dodecyl beta-D-maltoside (DDM), N-ethylurea, n-hexanol, N-lauryl sarcoside, N-lauryl sarcosine, N-methylformamide, N-methylurea, n-octyl-b-D-glucoside (OG: Octyl glucoside), n-penthanol, nickel chloride, non-detergent sulfo betaine (NDSB), Nonidet P40 (NP40), octyl beta-D-glucopyranoside, poly-L-glutamic acid, polyethylene glycol (for example, PEG 300, PEG 3350, PEG 4000), polyethyleneglycol lauryl ether (Brij 35), polyoxyethylene (2) oleyl ether (Brij 93), polyoxyethylene cetyl ether (Brij 56), polyvinylpyrrolidone 40 (PVP40), potassium chloride, potassium citrate, potassium nitrate, proline, putrescine, spermidine, spermine, riboflavin, samarium bromide, sarcosine, sodium acetate, sodium chloride, sodium dodecyl sulfate (SDS), sodium fluoride, sodium iodide, sodium lauroyl sarcosinate (Sarkosyl), sodium malonate, sodium molybdate, sodium selenite, sodium sulfate, sodium thiocyanate, sucrose, taurine, trehalose, tricine, triethylamine, trimethylamine N-oxide (TMAO), tris (2-carboxyethyl) phosphine (TCEP), Triton X-100, Tween 20, Tween 60, Tween 80, urea, vitamin B12, xylitol, yttrium chloride, yttrium nitrate, zinc chloride, Zwittergent 3-08, Zwittergent 3-14, or a combination thereof. In certain embodiments, the RNP stabilizer comprises a negatively charged polymer. In certain embodiments, the RNP stabilizer comprises poly-L-glutamic acid (PGA) or a suitable alternative. In certain embodiments, provided herein are compositions, methods, and/or kits comprising poly-L-glutamic acid.

[0092] The one or more RNP stabilizers can be present at any suitable concentration. In certain embodiments, the one or more RNP stabilizers are present at a concentration of at least 0.01, 0.05, 0.1, 0.15, 0.2, 0.25, 0.3, 0.35, 0.4, 0.45, 0.5, 0.55, 0.6, 0.65, 0.7, 0.75, 0.8, 0.85, 0.9, 0.95, 1, 1.5, 2, 2.5, 3, 3.5, 4, or 4.5 and/or not more than 0.05, 0.1, 0.15, 0.2, 0.25, 0.3, 0.35, 0.4, 0.45, 0.5, 0.55, 0.6, 0.65, 0.7, 0.75, 0.8, 0.85, 0.9, 0.95, 1, 1.5, 2, 2.5, 3, 3.5, 4, 4.5, or 5 μM per pmol RNP complex, for example 0.01-5 μM per pmol RNP complex, preferably 0.01-3 μM per pmol RNP complex, even more preferably 0.015-2.5 μM per pmol RNP complex, vet more preferably 0.01-1 μM per pmol RNP complex.

[0093] The one or more RNP stabilizers can be present at any suitable concentration. In certain embodiments where the one or more RNP stabilizers are a polymer product, the one or more RNP stabilizers are present at a concentration of at least 0.01, 0.05, 0.1, 0.15, 0.2, 0.25, 0.3, 0.35, 0.4, 0.45, 0.5, 0.55, 0.6, 0.65, 0.7, 0.75, 0.8, 0.85, 0.9, 0.95, 1, 1.5, 2, 2.5, 3, 3.5, 4, or 4.5 and/or not more than 0.05, 0.1, 0.15, 0.2, 0.25, 0.3, 0.35, 0.4, 0.45, 0.5, 0.55, 0.6, 0.65, 0.7, 0.75, 0.8, 0.85, 0.9, 0.95, 1, 1.5, 2, 2.5, 3, 3.5, 4, 4.5, or 5 μg μL⁻¹ per pmol RNP complex, for example 0.01-5 μg μL⁻¹ per pmol RNP complex, preferably 0.01-3 μg μL⁻¹ per pmol RNP complex, even more preferably 0.25-2.5 μg μL⁻¹ per pmol RNP complex, yet more preferably 0.5-1.5 μg μL⁻¹ per pmol RNP complex. In certain embodiments, the polymeric RNP stabilizer comprises PGA.

[0094] In certain embodiments, provided herein are compositions, methods, and/or kits comprising one or more additives that inhibit NHEJ, e.g., NHEJ inhibitor. In certain embodiments, the one or more additives that inhibit NHEJ are introduced to the target cell prior to delivery of the nucleic acid-guided nuclease, guide nucleic acid, and/or donor template, or one or more polynucleotides encoding the nucleic acid-guided nuclease, guide nucleic acid, and/or donor template. In certain embodiments, the one or more additives that inhibit NHEJ are introduced to the target cell after delivery of the nucleic acid-guided nuclease, guide nucleic acid, and/or donor template, or one or more polynucleotides encoding the nucleic acid-guided nuclease, guide nucleic acid, and/or donor template. In certain embodiments, the one or more additives that inhibit NHEJ are introduced to the target cell both prior to and after delivery of the nucleic acid-guided nuclease, guide nucleic acid, and/or donor template, or one or more polynucleotides encoding the nucleic acid-guided nuclease, guide nucleic acid, and/or donor template. In certain embodiments, the one or more additives that inhibit NHEJ are introduced into the cell medium, wherein the one or more NHEJ inhibitors can enter the cell.

[0095] In certain embodiments, the one or more additives that inhibit NHEJ comprise a molecule that indirectly or directly affects the interaction of p53-binding protein 1 (53BP1) with ubiquitylated histones at double stranded breaks, for example, iP53 or the like. In certain embodiments, the one or more additives that inhibit NHEJ comprise a molecule that directly or indirectly affects the interaction of Ku proteins with DNA, for example, STL127705 or the like. In certain embodiments, the one or more additives that inhibit NHEJ comprise a molecule that directly or indirectly affects the activity of DNA-dependent protein kinases, for example, M3814, KU-0060648, NU7026 or the like. In certain embodiments, the one or more additives that inhibit NHEJ comprise a molecule that directly or indirectly affects the activity of ATM-Rad3-related (ATR) proteins, for example VE-822 or the like. In certain embodiments, the one or more additives that inhibit NHEJ comprise a molecule that directly or indirectly affects the activity of ligases, e.g., ligase IV, for example SCR7 or the like. In certain embodiments, the one or more additives that inhibit NHEJ comprise a molecule that directly or indirectly affects the activity of RAD51 binding to ssDNA, for example RS-1 or the like. In certain embodiments, the one or more additives that inhibit NHEJ comprise a molecule that directly or indirectly affects the activity cell cycle stage progression, for example aphidicolin, mimosin, thymidine, hydroxy urea, nocodazole, ABT-751, XL413, or the like. In certain embodiments, the one or more additives that inhibit NHEJ comprise a molecule that directly or indirectly affects the activity beta-3-adrenergic receptors, for example L755507 or the like. In certain embodiments, the one or more additives that inhibit NHEJ comprise a molecule that directly or indirectly affects the activity of intracellular transport from endoplasmic reticulum (ER) to golgi, for example Brefeldin A or the like. In certain embodiments, the one or more additives that inhibit NHEJ comprise a molecule that directly or indirectly affects the activity histone deacetylases, for example valproic acid (VPA). In certain embodiments, the one or more additives that inhibit NHEJ comprise M3814.

[0096] In certain embodiments, the one or more NHEJ inhibitors are present at a concentration of at least 0.1, 0.25, 0.5, 0.75, 1, 1.25, 1.5, 1.75, 2, 2.5, 3, or 4 and/or not more than 0.25, 0.5, 0.75, 1, 1.25, 1.5, 1.75, 2, 2.5, 3, 4, or 5 μM, for example 0.1-5 μM, preferably 0.5-5 μM, even more preferably 1-3 μM, yet more preferably 2 μM. In certain embodiments, the one or more NHEJ inhibitors comprise M3814.

[0097] In certain embodiments, the NHEJ inhibitor reduces the activity of NHEJ-based repair, wherein the relative amount of repair via homology-directed repair (HDR) is increased. In certain embodiments, the amount of HDR compared to NHEJ is increased by at least 1.1. 1.15, 1.2. 1.25, 1.3, 1.35, 1.4, 1.45, 1.5, 1.55, 1.6, 1.65, 1.7, 1.75, 1.8, 1.85, 1.9, 1.95, 2, 2.25, 2.5, 2.75, 3, 4, 5, 6, 7, 8, or 9-fold and/or not more than 1.15, 1.2, 1.25, 1.3, 1.35, 1.4, 1.45, 1.5, 1.55, 1.6, 1.65, 1.7, 1.75, 1.8, 1.85, 1.9, 1.95, 2, 2.25, 2.5, 2.75, 3, 4, 5, 6, 7, 8, 9, or 10-fold increased editing via homology directed repair (HDR) as compared to editing via NHEJ in cells treated with the one or more NHEJ inhibitors as compared to those not treated with one or more NHEJ inhibitors, for example 1.1-10-fold increased editing, preferably 1.1-5-fold increased editing, even more preferably 1.1-3-fold increased editing, yet more preferably 1.1-2-fold increased editing. In certain embodiments, the amount of INDEL formation due to NHEJ as measured by sequencing is reduced by at least 1.1, 1.15, 1.2, 1.25, 1.3, 1.35, 1.4, 1.45, 1.5, 1.55, 1.6, 1.65, 1.7, 1.75, 1.8, 1.85, 1.9, 1.95, 2, 2.25, 2.5, 2.75, 3, 4, 5, 6, 7, 8, or 9-fold and/or not more than 1.15, 1.2. 1.25, 1.3. 1.35, 1.4, 1.45, 1.5, 1.55, 1.6, 1.65, 1.7, 1.75, 1.8, 1.85, 1.9, 1.95, 2, 2.25, 2.5, 2.75, 3, 4, 5, 6, 7, 8, 9, or 10-fold reduced INDEL formation due to NHEJ as compared to an untreated control, for example 1.1-10-fold reduced INDEL formation, preferably 1.1-5-fold reduced INDEL formation, even more preferably 1.1-3-fold reduced INDEL formation, yet more preferably 1.1-2-fold reduced INDEL formation. Any suitable sequencing method known in the art may be used to determine the relative types of edits generated following treatment.

[0098] In certain embodiments, provided herein are compositions, methods, and/or kits comprising nucleic acid-guided nucleases. In certain embodiments, provided herein are compositions, methods, and/or kits comprising engineered nucleic acid-guided nucleases. In certain embodiments, provided herein are compositions, methods, and/or kits wherein the nuclease comprises a Cas nuclease. In certain embodiments, provided herein are compositions, methods, and/or kits wherein the nuclease comprises a Class 1 or Class 2 Cas nuclease. In certain embodiments, provided herein are compositions, methods, and/or kits wherein the nuclease comprises a Type V nuclease. In certain embodiments, provided herein are compositions, methods, and/or kits wherein the nuclease comprises a Type V-A, V-B, V-C, V-D, or V-E nuclease. In certain embodiments, provided herein are compositions, methods, and/or kits wherein the nuclease comprises a Type V-A nuclease. In certain embodiments, provided herein are compositions, methods, and/or kits wherein the nuclease comprises a MAD, ABW, or ART nuclease. In certain embodiments, provided herein are compositions, methods, and/or kits wherein the nuclease comprises a MAD1, MAD2, MAD3, MAD4, MAD5, MAD6, MAD7, MAD8, MAD9, MAD10, MAD11, MAD12, MAD13, MAD14, MAD15, MAD16, MAD17, MAD18, MAD19, or MAD20 nuclease. In certain embodiments, provided herein are compositions, methods, and/or kits wherein the nuclease comprises an ART1, ART2, ART3, ART4, ART5, ART6, ART7, ART8, ART9, ART10, ART11, ART11*, ART12, ART13, ART14, ART15, ART16, ART17, ART18, ART19, ART20, ART21, ART22, ART23, ART24, ART25, ART26, ART27, ART28, ART29, ART30, ART31, ART32, ART33, ART34, or ART35 nuclease. In certain embodiments, provided herein are compositions, methods, and/or kits wherein the nuclease comprises a MAD2, MAD7, ART11, ART11*, or ART2 nuclease. In certain embodiments, provided herein are compositions, methods, and/or kits wherein the nuclease comprises one or more nuclear localization signals. In certain embodiments, provided herein are compositions, methods, and/or kits the nuclease comprises 1 or 4 nuclear localization signals, such as 1-4 NLS at the carboxy terminus, 1-4 NLS at the amino terminus, or a combination thereof. Additional nucleases and modifications thereof may be found in the Cas nuclease section below.

[0099] In certain embodiments, provided herein are compositions, methods, and/or kits wherein the relative amount (e.g., proportion) of gNA to nuclease results in improved editing efficiencies. In certain embodiments, provided herein are compositions, methods, and/or kits wherein the proportion of gNA to nuclease is at least 1, 1.05 1.1, 1.15, 1.2, 1.25, 1.3, 1.35, 1.4, 1.45, 1.5, 1.55, 1.6, 1.65, 1.7, 1.75, 1.8, 1.85, 1.9, or 1.95 and/or not more than 1.05 1.1, 1.15, 1.2, 1.25, 1.3, 1.35, 1.4, 1.45, 1.5, 1.55, 1.6, 1.65, 1.7, 1.75, 1.8, 1.85, 1.9, 1.95 or 2 parts for every part of nuclease, for example, 1-2 parts of gNA for every part of nuclease, preferably, 1.15-1.85 parts of gNA for every part of nuclease, even more preferably 1.25-1.75 parts of gNA for every part of nuclease, yet more preferably 1.5 parts of gNA for every part of nuclease. In certain embodiments, provided herein are compositions, methods, and/or kits the gNA and nuclease are present at 150:100 or 75:50 pmol respectively.

[0100] In certain embodiments, provided herein are compositions, methods, and/or kits wherein the amount of donor template delivered to the cell results affects editing efficiencies. In certain embodiments, provided herein are compositions, methods, and/or kits wherein the donor template is present at a concentration of at least 0.05, 0.01, 0.2, 0.3, 0.4, 0.5, 0.6, 0.7, 0.8, 0.9, 1, 1.25, 1.5, 1.75, 2, 3, or 4, and/or no more than 0.01, 0.2, 0.3, 0.4, 0.5, 0.6, 0.7, 0.8, 0.9, 1, 1.25, 1.5, 1.75, 2, 3, 4, or 5 μg μL⁻¹, for example 0.01-5 μg μL⁻¹, preferably 0.01-3 μg μL⁻¹, even more preferably 0.3-3 μg μL⁻¹, yet even more preferably 0.5-1.5 μg μL⁻¹.

[0101] In certain embodiments, provided herein are compositions comprising a nucleic acid-guided nuclease system and at least one additive that stabilizes the nucleic acid-guided nucleases. In certain embodiments, the nucleic acid-guided nuclease system comprises a naturally occurring system. In certain embodiments, the nucleic acid-guided nuclease system comprises an engineered, non-naturally occurring system. In certain embodiments, provided herein is a composition comprising one or more nucleases system comprising: a nucleic acid-guided nuclease; and a guide nucleic acid (gNA) compatible with and capable of binding to and activating the nucleic acid-guided nuclease, wherein the gNA comprises: a targeter nucleic acid comprising a targeter stem sequence and a spacer sequence, wherein the spacer sequence is complementary to a target nucleotide sequence within a target polynucleotide, for example a target polynucleotide of a genome of a human target cell; and a modulator nucleic acid comprising a modulator stem sequence complementary to the targeter stem sequence, and, optionally, a 5′ sequence; and at least one additive that stabilizes the nucleic acid-guided nuclease system. In certain embodiments, the composition comprises any nuclease disclosed herein in the Cas nuclease section. In certain embodiments, the composition comprises a single guide nucleic acid. In certain embodiments, the composition comprises a dual guide nucleic acid as disclosed herein in the Guide nucleic acids section. In certain embodiments, the composition comprises a guide nucleic acid comprising a spacer sequence comprising any one of SEQ ID NOs: 86-384 as shown in Table 5. In certain embodiments, the guide nucleic acid comprises one or more chemical modifications as disclosed herein in the gNA modifications section. In certain embodiments, the composition further comprises a donor template as disclosed herein in the Donor templates section. In certain embodiments, the composition is introduced into one or more cells, wherein the composition can bind to a target sequence within a target polynucleotide within the genome of a human target cell and generate a strand break in at least one strand at or near the target sequence. In certain embodiments, the NHEJ inhibitor is added to the one or more human target cells prior to or after delivery of the composition. In certain embodiments, at least a portion of the donor template is introduced into the target polynucleotide at or near the strand break via an innate cell repair mechanism. In certain embodiments the innate repair mechanism comprises homology directed repair (HDR), e.g., homologous recombination.

[0102] In certain embodiments, provided herein are compositions comprising one or more human target cells comprising at least one additive that reduces non-homologous end joining (NHEJ). In certain embodiments, provided herein are compositions further comprising a nucleic acid-guided nuclease as disclosed herein in Cas nuclease section. In certain embodiments, provided herein is a composition comprising: a nucleic acid-guided nuclease capable of binding to a compatible guide nucleic acid (gNA) comprising a spacer sequence complementary to a target nucleotide sequence within a target polynucleotide, e.g., a target polynucleotide of a genome of a human target cell and generating a strand break in one or both strands of the target polynucleotide: one or more human target cells; and at least one additive that reduces non-homologous end joining (NHEJ)-based DNA repair. In certain embodiments provided herein is a composition comprising a human cell comprising: a nuclease capable of binding to a compatible guide nucleic acid (gNA) comprising a spacer sequence complementary to a target nucleotide sequence within a target polynucleotide of a genome of the human cell and generating a strand break in one or both strands of the target polynucleotide; and at least one additive that reduces non-homologous end joining (NHEJ)-based DNA repair. In certain embodiments, the composition further comprises a guide nucleic acid as disclosed herein in the Guide nucleic acids section. In certain embodiments, the composition comprises a guide nucleic acid comprising a spacer sequence comprising any one of SEQ ID NOs: 86-384 as shown in Table 5. In certain embodiments, the guide nucleic acid comprises one or more chemical modifications as disclosed herein in the gNA modifications section. In certain embodiments, the nuclease forms a nucleic acid-guided nuclease complex with the guide nucleic acid. In certain embodiments, the composition further comprises a donor template as disclosed herein in the Donor templates section. In certain embodiments, the nuclease complex can bind to a target sequence within a target polynucleotide within the genome of a human target cell and generate a strand break in at least one strand at or near the target sequence. In certain embodiments, the NHEJ inhibitor is added to the one or more human target cells prior to or after delivery of the composition. In certain embodiments, at least a portion of the donor template is introduced into the target polynucleotide at or near the strand break via an innate cell repair mechanism. In certain embodiments the innate repair mechanism comprises homology directed repair (HDR), e.g., homologous recombination.

[0103] In certain embodiments, provided herein are methods. In certain embodiments, provided herein are methods for engineering cells. In certain embodiments, provided herein are methods for engineering human cells. In certain embodiments, provided herein are methods for efficiently engineering human cells. In certain embodiments, provided herein is a method for editing a target polynucleotide in the genome of a human target cell comprising one or more of steps (A) to (G), wherein step (A) comprises forming the nuclease complex by combining one or more nucleases with one or more guide nucleic acids and/or one or more RNP stabilizers: step (B) comprises delivering the nuclease system to the human target cell: step (C) comprises delivering one or more donor templates to the human target cell: step (D) comprises contacting the target polynucleotide with a nuclease system comprising: a nucleic acid-guided nuclease; and a guide nucleic acid (gNA) compatible with and capable of binding to and activating the nucleic acid-guided nuclease, wherein the gNA comprises: a targeter nucleic acid comprising a targeter stem sequence and a spacer sequence, wherein the spacer sequence is complementary to a target nucleotide sequence within a target polynucleotide, for example a target polynucleotide of a genome of a human target cell; and a modulator nucleic acid comprising a modulator stem sequence complementary to the targeter stem sequence, and, optionally, a 5′ sequence: step (E) comprises contacting the cell with at least one additive that reduces non-homologous end joining (NHEJ)-based DNA repair: step (F) comprises growing the cell in a suitable growth medium: step (G) isolating one or more cells that demonstrate the genotype and/or phenotype of interest. In certain embodiments, any number of steps (A) through (G) may be performed in any order. In certain embodiments, the one or more steps (A) through (G) may be performed on the same population of cells. In certain embodiments, the one or more steps (A) through (G) may be performed on the progeny of a first set of cells treated with the one or more steps (A) through (G).

[0104] In certain embodiments, the method comprises the following steps and order: step (A) is performed wherein the gNA is combined with the RNP stabilizer prior to addition of the nuclease to form a stabilized nucleic acid-guided nuclease complex; step (B) and step (C) are performed sequentially such that the one or more nucleic acid-guided nuclease complexes are combined with the one or more donor templates and delivered to the one or more human target cells; step (D); step (E) wherein the one or more NHEJ inhibitors are added to the cell recovery medium; step (F).

[0105] Step (A) is illustrated in FIG. 25. FIG. 25 shows the combination of a guide nucleic acid (2502) with one or more RNP stabilizers (2503). The nuclease (2501) is combined (2504) with the gNA-RNP stabilizer mixture, whereby a stabilized nucleic acid-guided nuclease complex (2505) is formed. The gNA molecule can comprise either a single or dual guide nucleic acid. A single gNA is shown in FIG. 25 for illustrative purposes only.

[0106] Steps (B) through (E) are illustrated in FIG. 26. FIG. 26 shows the delivery (2607) of the stabilized RNP complex (2603) comprising a nuclease, one or more RNP stabilizer (2604), and a guide nucleic acid (2602) along with, optionally, one or more donor templates (2605) to one or more human target cells (2601), resulting in a cell comprising a one or more nuclease complex and/or one or more donor templates (2608). The one or more NHEJ inhibitors (2606) may be added before or after delivery of the nucleic acid-guided nuclease complex and/or the one or more donor templates.

[0107] In certain embodiments, the human cell comprises an immune cell or a stem cell. In certain embodiments, the immune cell comprises a neutrophil, eosinophil, basophil, mast cell, monocyte, macrophage, dendritic cell, natural killer cell, or a lymphocyte. In certain embodiments, the immune cell comprises a T cell. In certain embodiments, the T cell comprises a CAR-T cell. In certain embodiments, the stem cell comprises a human pluripotent, multipotent stem cell, embryonic stem cell, induced pluripotent stem cell, CD34+ stem cell, or hematopoietic stem cell. In certain embodiments, the human cell is allogeneic, i.e., a cell that provokes little or no immune response when introduced into an allogeneic host and produces little or no graft versus host response.

### III. Engineered Non-Naturally-Occurring Dual Guide CRISPR-Cas Systems

[0108] A CRISPR-Cas system generally comprises a Cas protein and one or more guide nucleic acids (gNAs). The Cas protein can be directed to a specific location in a double-stranded DNA target by recognizing a protospacer adjacent motif (PAM) in the non-target strand of the DNA, and the one or more guide nucleic acids can be directed to a specific location by hybridizing with a target nucleotide sequence, also referred to herein as a target sequence, in the target strand of the target polynucleotide. Typically, both PAM recognition and target nucleotide sequence hybridization are required for stable binding of a CRISPR-Cas complex to the DNA target and, if the Cas protein has an effector function (e.g., nuclease activity), activation of the effector function. As a result, when creating a CRISPR-Cas system, a guide nucleic acid can be designed to comprise a nucleotide sequence called a spacer sequence that is at least partially complementary to and can hybridize with a target nucleotide sequence, where target nucleotide sequence is located adjacent to a PAM in an orientation operable with the Cas protein. It has been observed that not all CRISPR-Cas systems designed by these criteria are equally effective. The larger polynucleotide in which a target nucleotide sequence is located may be referred to as a target polynucleotide: e.g., a chromosome or other genomic DNA, or portion thereof, or any other suitable polynucleotide within which a target nucleotide sequence is located. The target polynucleotide in double stranded DNA comprises two strands. The strand of the DNA duplex to which the spacer sequence is complementary herein is called the “target strand,” while the strand to which the spacer sequence shares sequence identity herein is called the “non-target strand.”

[0109] Two distinct classes of CRISPR-Cas systems have been identified. Class 1 CRISPR-Cas systems utilize multi-protein effector complexes, whereas class 2 CRISPR-Cas systems utilize single-protein effectors (see, Makarova et al. (2017) CELL, 168:328). Among the types of class 2 CRISPR-Cas systems, type II and type V systems typically target DNA and type VI systems typically target RNA (id.). Naturally occurring type II effector complexes include Cas9, CRISPR RNA (crRNA), and trans-activating CRISPR RNA (tracrRNA), but the crRNA and tracrRNA can be fused as a single guide RNA in an engineered system for simplicity (see, Wang et al. (2016) ANNU. REV. BIOCHEM., 85:227). Certain naturally occurring type V systems, such as type V-A, type V-C, and type V-D systems, do not require tracrRNA and use crRNA alone as the guide for cleavage of target DNA (see, Zetsche et al. (2015) CELL, 163:759; Makarova et al. (2017) CELL, 168:328.

[0110] Naturally occurring type II CRISPR-Cas systems (e.g., CRISPR-Cas9 systems) generally comprise two guide nucleic acids, called crRNA and tracrRNA, which form a complex by nucleotide hybridization. Single guide nucleic acids capable of activating type II Cas nucleases have been developed, for example, by linking the crRNA and the tracrRNA (see, e.g., U.S. Pat. Nos. 10,266,850 and 8,906,616). Naturally occurring type II Cas proteins comprise a RuvC-like nuclease domain and an HNH endonuclease domain, and recognize a 3′ G-rich PAM located immediately downstream from the target nucleotide sequence, the orientation determined using the non-target strand (i.e., the strand not hybridized with the spacer sequence) as the coordinate. The CRISPR-Cas systems cleave a double-stranded DNA to generate a blunt end. The cleavage site is generally 3-4 nucleotides upstream from the PAM on the non-target strand.

[0111] Naturally occurring Type V-A, Type V-C, and Type V-D CRISPR-Cas systems lack a tracrRNA and rely on a single crRNA to guide the CRISPR-Cas complex to the target polynucleotide. Dual guide nucleic acids capable of activating type V-A, type V-C, or type V-D Cas nucleases have been developed, for example, by splitting the single crRNA into a targeter nucleic acid and a modulator nucleic acid (see, e.g., International (PCT) Application Publication No. WO 2021/067788). Naturally occurring type V-A Cas proteins comprise a RuvC-like nuclease domain but lack an HNH endonuclease domain, and recognize a 5′ T-rich PAM located immediately upstream from the target nucleotide sequence, the orientation determined using the non-target strand (i.e., the strand not hybridized with the spacer sequence) as the coordinate. These CRISPR-Cas systems cleave a double-stranded DNA to generate a staggered double-stranded break rather than a blunt end. The cleavage site is distant from the PAM site (e.g., separated by at least 10, 11, 12, 13, 14, or 15 nucleotides downstream from the PAM on the non-target strand and/or separated by at least 15, 16, 17, 18, or 19 nucleotides upstream from the sequence complementary to PAM on the target strand).

[0112] Elements in an exemplary single guide CRISPR Cas system, e.g., a type V-A CRISPR-Cas system, are shown in FIG. 1A. The single gNA can also be called a “crRNA” or “single gRNA” where it is present in the form of an RNA. It can comprise, from 5′ to 3′, an optional 5′ sequence, e.g., a tail, a modulator stem sequence, a loop, a targeter stem sequence complementary to the modulator stem sequence, and a spacer sequence that is at least partially complementary to and can hybridize with a target sequence in the target strand of the target polynucleotide. Where a 5′ tail is present, the sequence including the 5′ tail and the modulator stem sequence can also be called a “modulator sequence” herein. A fragment of the single guide nucleic acid from the optional 5′ tail to the targeter stem sequence, also called a “scaffold sequence” herein, bind the Cas protein. In addition, the PAM in the non-target strand of the target DNA binds the Cas protein.

[0113] Elements in an exemplary dual guide type CRISPR Cas system, e.g., a dual guide type V-A CRISPR-Cas system are shown in FIG. 1B. The first guide nucleic acid, which can be called a “modulator nucleic acid” herein, comprises, from 5′ to 3′, an optional 5′ tail and a modulator stem sequence. Where a 5′ tail is present, the sequence including the 5′ tail and the modulator stem sequence can also called a “modulator sequence” herein. The second guide nucleic acid, which can be called “targeter nucleic acid” herein, comprises, from 5′ to 3″, a targeter stem sequence complementary to the modulator stem sequence and a spacer sequence that is at least partially complementary to and can hybridize with the target sequence in the target strand of the target polynucleotide. The duplex between the modulator stem sequence and the targeter stem sequence, plus the optional 5′ tail, constitute a structure that binds the Cas protein. In addition, the PAM in the non-target strand of the target DNA binds the Cas protein. It is understood that, in a dual gNA, e.g., dual gRNA, the targeter nucleic acid and the modulator nucleic acid, while not in the same nucleic acids, i.e., not linked end-to-end through a traditional internucleotide bond, can be covalently conjugated to each other through one or more chemical modifications introduced into these nucleic acids, thereby increasing the stability of the double-stranded complex and/or improving other characteristics of the system.

[0114] The terms “targeter stem sequence” and “modulator stem sequence,” as used herein, can refer to a pair of nucleotide sequences in one or more guide nucleic acids that hybridize with each other. When a targeter stem sequence and a modulator stem sequence are contained in a single guide nucleic acid, the targeter stem sequence is proximal to a spacer sequence designed to hybridize with a target nucleotide sequence, and the modulator stem sequence is proximal to the targeter stem sequence. When a targeter stem sequence and a modulator stem sequence are in separate nucleic acids, the targeter stem sequence is in the same nucleic acid as a spacer sequence designed to hybridize with a target nucleotide sequence. In a CRISPR-Cas system that naturally includes separate crRNA and tracrRNA (e.g., a type II system), the duplex formed between the targeter stem sequence and the modulator stem sequence corresponds to the duplex formed between the crRNA and the tracrRNA. In a CRISPR-Cas system that naturally includes a single crRNA but no tracrRNA (e.g., a type V-A system), the duplex formed between the targeter stem sequence and the modulator stem sequence corresponds to the stem portion of a stem-loop structure in the scaffold sequence of the crRNA. It is understood that 100% complementarity is not required between the targeter stem sequence and the modulator stem sequence. In a type V-A CRISPR-Cas system, however, the targeter stem sequence is typically 100% complementary to the modulator stem sequence.

### A. Cas Proteins

[0115] A guide nucleic acid, either as a single guide nucleic acid alone (targeter and modulator nucleic acids are part of a single polynucleotide) or as a dual gNA comprising separate targeter nucleic acid used in combination with a cognate modulator nucleic acid, is capable of binding a CRISPR Associated (Cas) protein, e.g., a Cas nuclease. In certain embodiments, the guide nucleic acid, either as a single guide nucleic acid alone (targeter and modulator nucleic acids are part of a single polynucleotide) or as a dual gNA comprising separate targeter nucleic acid used in combination with a cognate modulator nucleic acid, is capable of activating a Cas nuclease. A gNA capable of activating a particular Cas nuclease is said to be “compatible” with the Cas nuclease; a Cas nuclease capable of being activated by a particular gNA is said to be “compatible” with the gNA.

[0116] The terms “CRISPR-Associated protein,” “Cas protein,” and “Cas,” as used interchangeably herein, can refer to a naturally occurring Cas protein or an engineered Cas protein. Non-limiting examples of Cas protein engineering include but are not limited to mutations and modifications of the Cas protein that alter the activity of the Cas, alter the PAM specificity, broaden the range of recognized PAMs, and/or reduce the ability to modify one or more off-target loci as compared to a corresponding unmodified Cas. In certain embodiments, the altered activity of engineered Cas comprises altered ability (e.g., specificity or kinetics) to bind a naturally occurring gNA, e.g., gRNA or engineered gNA, e.g., gRNA, altered ability (e.g., specificity or kinetics) to bind a target nucleotide sequence, altered processivity of nucleic acid scanning, and/or altered effector (e.g., nuclease) activity. A Cas protein having nuclease activity can be referred to as a “CRISPR-Associated nuclease” or “Cas nuclease,” or simply “nuclease,” as used interchangeably herein.

[0117] In certain embodiments, the Cas protein is a type V-A, type V-C, or type V-D Cas protein. In certain embodiments, the Cas protein is a type V-A Cas protein. In other embodiments, the Cas protein is a type II Cas protein, e.g., a Cas9 protein.

[0118] In certain embodiments, a type V-A Cas nucleases comprises Cpf1. Cpf1 proteins are known in the art and are described, e.g., in U.S. Pat. Nos. 9,790,490 and 10,113,179. Cpf1 orthologs can be found in various bacterial and archaeal genomes. For example, in certain embodiments, the Cpf1 protein is derived from Francisella novicida U112 (Fn), Acidaminococcus sp. BV3L6 (As), Lachnospiraceae bacterium ND2006 (Lb), Lachnospiraceae bacterium MA2020 (Lb2), Candidatus Methanoplasma termitum (CMt), Moraxella bovoculi 237 (Mb), Porphyromonas crevioricanis (Pc), Prevotella disiens (Pd), Francisella tularensis 1, Francisella tularensis subsp. novicida, Prevotella albensis, Lachnospiraceae bacterium MC2017 1, Butyrivibrio proteoclasticus, Peregrinibacteria bacterium GW2011_GWA2_33_10, Parcubacteria bacterium GW2011_GWC2 44 17, Smithella sp. SCADC, Eubacterium eligens, Leptospira inadai, Porphyromonas macacae. Prevotella bryantii. Proteocatella sphenisci. Anaerovibrio sp. RM50, Moraxella caprae. Lachnospiraceae bacterium COE1, or Eubacterium coprostanoligenes.

[0119] In certain embodiments, a type V-A Cas nuclease comprises AsCpf1 or a variant thereof. In certain embodiments, a type V-A Cas protein comprises an amino acid sequence at least 30%, 40%, 50%, 60%, 70%, 80%, 85%, 90%, 91%, 92%, 93%, 94%, 95%, 96%, 97%, 98%, 99%, or 100% identical to the amino acid sequence set forth in SEQ ID NO: 3 of International (PCT) Application Publication No. WO 2021/158918. In certain embodiments, a type V-A Cas protein comprises the amino acid sequence set forth in SEQ ID NO: 3 of International (PCT) Application Publication No. WO 2021/158918.

[0120] In certain embodiments, a type V-A Cas nuclease comprises LbCpf1 or a variant thereof. In certain embodiments, a type V-A Cas protein comprises an amino acid sequence at least 30%, 40%, 50%, 60%, 70%, 80%, 85%, 90%, 91%, 92%, 93%, 94%, 95%, 96%, 97%, 98%, 99%, or 100% identical to the amino acid sequence set forth in SEQ ID NO: 4 of International (PCT) Application Publication No. WO 2021158918. In certain embodiments, a type V-A Cas protein comprises the amino acid sequence set forth in SEQ ID NO: 4 of International (PCT) Application Publication No. WO 2021/158918.

[0121] In certain embodiments, a type V-A Cas nuclease comprises FnCpf1 or a variant thereof. In certain embodiments, a type V-A Cas protein comprises an amino acid sequence at least 30%, 40%, 50%, 60%, 70%, 80%, 85%, 90%, 91%, 92%, 93%, 94%, 95%, 96%, 97%, 98%, 99%, or 100% identical to the amino acid sequence set forth in SEQ ID NO: 5 of International (PCT) Application Publication No. WO 2021158918. In certain embodiments, a type V-A Cas protein comprises the amino acid sequence set forth in SEQ ID NO: 5 of International (PCT) Application Publication No. WO 2021/158918.

[0122] In certain embodiments, a type V-A Cas nuclease comprises Prevotella bryantii Cpf1 (PbCpf1) or a variant thereof. In certain embodiments, a type V-A Cas protein comprises an amino acid sequence at least 30%, 40%, 50%, 60%, 70%, 80%, 85%, 90%, 91%, 92%, 93%, 94%, 95%, 96%, 97%, 98%, 99%, or 100% identical to the amino acid sequence set forth in SEQ ID NO: 6 of International (PCT) Application Publication No. WO 2021/158918. In certain embodiments, a type V-A Cas protein comprises the amino acid sequence set forth in SEQ ID NO: 6 of International (PCT) Application Publication No. WO 2021/158918.

[0123] In certain embodiments, a type V-A Cas nuclease comprises Proteocatella sphenisci Cpf1 (PsCpf1) or a variant thereof. In certain embodiments, a type V-A Cas protein comprises an amino acid sequence at least 30%, 40%, 50%, 60%, 70%, 80%, 85%, 90%, 91%, 92%, 93%, 94%, 95%, 96%, 97%, 98%, 99%, or 100% identical to the amino acid sequence set forth in SEQ ID NO: 7 of International (PCT) Application Publication No. WO 2021158918. In certain embodiments, a type V-A Cas protein comprises the amino acid sequence set forth in SEQ ID NO: 7 of International (PCT) Application Publication No. WO 2021/158918.

[0124] In certain embodiments, a type V-A Cas nuclease comprises Anaerovibrio sp. RM50 Cpf1 (As2Cpf1) or a variant thereof. In certain embodiments, a type V-A Cas protein comprises an amino acid sequence at least 30%, 40%, 50%, 60%, 70%, 80%, 85%, 90%, 91%, 92%, 93%, 94%, 95%, 96%, 97%, 98%, 99%, or 100% identical to the amino acid sequence set forth in SEQ ID NO: 8 of International (PCT) Application Publication No. WO 2021158918. In certain embodiments, a type V-A Cas protein comprises the amino acid sequence set forth in SEQ ID NO: 8 of International (PCT) Application Publication No. WO 2021/158918.

[0125] In certain embodiments, a type V-A Cas nuclease comprises Moraxella caprae Cpf1 (McCpf1) or a variant thereof. In certain embodiments, a type V-A Cas protein comprises an amino acid sequence at least 30%, 40%, 50%, 60%, 70%, 80%, 85%, 90%, 91%, 92%, 93%, 94%, 95%, 96%, 97%, 98%, 99%, or 100% identical to the amino acid sequence set forth in SEQ ID NO: 9 of International (PCT) Application Publication No. WO 2021/158918. In certain embodiments, a type V-A Cas protein comprises the amino acid sequence set forth in SEQ ID NO: 9 of International (PCT) Application Publication No. WO 2021/158918.

[0126] In certain embodiments, a type V-A Cas nuclease comprises Lachnospiraceae bacterium COE1 Cpf1 (Lb3Cpf1) or a variant thereof. In certain embodiments, a type V-A Cas protein comprises an amino acid sequence at least 30%, 40%, 50%, 60%, 70%, 80%, 85%, 90%, 91%, 92%, 93%, 94%, 95%, 96%, 97%, 98%, 99%, or 100% identical to the amino acid sequence set forth in SEQ ID NO: 10 of International (PCT) Application Publication No. WO 2021158918. In certain embodiments, a type V-A Cas protein comprises the amino acid sequence set forth in SEQ ID NO: 10 of International (PCT) Application Publication No. WO 2021/158918.

[0127] In certain embodiments, a type V-A Cas nuclease comprises Eubacterium coprostanoligenes Cpf1 (EcCpf1) or a variant thereof. In certain embodiments, a type V-A Cas protein comprises an amino acid sequence at least 30%, 40%, 50%, 60%, 70%, 80%, 85%, 90%, 91%, 92%, 93%, 94%, 95%, 96%, 97%, 98%, 99%, or 100% identical to the amino acid sequence set forth in SEQ ID NO: 11 of International (PCT) Application Publication No. WO 2021158918. In certain embodiments, a type V-A Cas protein comprises the amino acid sequence set forth in SEQ ID NO: 11 of International (PCT) Application Publication No. WO 2021/158918.

[0128] In certain embodiments, a type V-A Cas nuclease is not Cpf1. In certain embodiments, a type V-A Cas nuclease is not AsCpf1.

[0129] In certain embodiments, a type V-A Cas nuclease comprises MAD1, MAD2, MAD3, MAD4, MAD5, MAD6, MAD7, MAD8, MAD9, MAD10, MAD11, MAD12, MAD13, MAD14, MAD15, MAD16, MAD17, MAD18, MAD19, or MAD20, or variants thereof. MAD1-MAD20 are known in the art and are described in U.S. Pat. No. 9,982,279.

[0130] In certain embodiments, a type V-A Cas nuclease comprises MAD7 or a variant thereof. In certain embodiments, a type V-A Cas protein comprises an amino acid sequence at least 30%, 40%, 50%, 60%, 70%, 80%, 85%, 90%, 91%, 92%, 93%, 94%, 95%, 96%, 97%, 98%, 99%, or 100% identical to the amino acid sequence set forth in SEQ ID NO: 37. In certain embodiments, a type V-A Cas protein comprises the amino acid sequence set forth in SEQ ID NO: 37.

MAD7
(SEQ ID NO: 37)
MNNGTNNFQNFIGISSLQKTLRNALIPTETTQQFIVKNGIIKEDE
LRGENRQILKDIMDDYYRGEISETLSSIDDIDWTSLFEKMEIQLK
NGDNKDTLIKEQTEYRKAIHKKFANDDRFKNMESAKLISDILPEF
VIHNNNYSASEKEEKTQVIKLESRFATSFKDYFKNRANCESADDI
SSSSCHRIVNDNAEIFFSNALVYRRIVKSLSNDDINKISGDMKDS
LKEMSLEEIYSYEKYGEFITQEGISFYNDICGKVNSFMNLYCQKN
KENKNLYKLQKLHKQILCIADTSYEVPYKFESDEEVYQSVNGELD
NISSKHIVERLRKIGDNYNGYNLDKIYIVSKFYESVSQKTYRDWE
TINTALEIHYNNILPGNGKSKADKVKKAVKNDLQKSITEINELVS
NYKLCSDDNIKAETYIHEISHILNNFEAQELKYNPEIHLVESELK
ASELKNVLDVIMNAFHWCSVEMTEELVDKDNNFYAELEEIYDEIY
PVISLYNLVRNYVTQKPYSTKKIKLNEGIPTLADGWSKSKEYSNN
AIILMRDNLYYLGIFNAKNKPDKKIIEGNTSENKGDYKKMIYNLL
PGPNKMIPKVFLSSKTGVETYKPSAYILEGYKQNKHIKSSKDEDI
TFCHDLIDYFKNCIAIHPEWKNFGFDESDTSTYEDISGFYREVEL
QGYKIDWTYISEKDIDLLQEKGQLYLFQIYNKDESKKSTGNDNLH
TMYLKNLFSEENLKDIVLKLNGEAEIFFRKSSIKNPIIHKKGSIL
VNRTYEAEEKDQFGNIQIVRKNIPENIYQELYKYFNDKSDKELSD
EAAKLKNVVGHHEAATNIVKDYRYTYDKYFLHMPITINFKANKTG
FINDRILQYIAKEKDLHVIGIDRGERNLIYVSVIDTCGNIVEQKS
ENIVNGYDYQIKLKQQEGARQIARKEWKEIGKIKEIKEGYLSLVI
HEISKMVIKYNAIIAMEDLSYGFKKGREKVERQVYQKFETMLINK
LNYLVEKDISITENGGLLKGYQLTYIPDKLKNVGHQCGCIFYVPA
AYTSKIDPTTGFVNIFKFKDLTVDAKREFIKKEDSIRYDSEKNLF
CFTEDYNNFITQNTVMSKSSWSVYTYGVRIKRRFVNGRESNESDT
IDITKDMEKTLEMTDINWRDGHDLRQDIIDYEIVQHIFEIFRLTV
QMRNSLSELEDRDYDRLISPVLNENNIFYDSAKAGDALPKDADAN
GAYCIALKGLYEIKQITENWKEDGKFSRDKLKISNKDWEDFIQNK
RYL

[0131] In certain embodiments, a type V-A Cas nuclease comprises MAD2 or a variant thereof. In certain embodiments, a type V-A Cas protein comprises an amino acid sequence at least 30%, 40%, 50%, 60%, 70%, 80%, 85%, 90%, 91%, 92%, 93%, 94%, 95%, 96%, 97%, 98%, 99%, or 100% identical to the amino acid sequence set forth in SEQ ID NO: 38. In certain embodiments, a type V-A Cas protein comprises the amino acid sequence set forth in SEQ ID NO: 38.

MAD2
(SEQ ID NO: 38)
MSSLTKFTNKYSKQLTIKNELIPVGKTLENIKENGLIDGDEQLNE
NYQKAKIIVDDELRDFINKALNNTQIGNWRELADALNKEDEDNIE
KLQDKIRGIIVSKFETEDLESSYSIKKDEKIIDDDNDVEEEELDL
GKKTSSFKYIFKKNLFKLVLPSYLKTINQDKLKIISSEDNESTYE
RGFFENRKNIFTKKPISTSIAYRIVHDNFPKELDNIRCENVWQTE
CPQLIVKADNYLKSKNVIAKDKSLANYFTVGAYDYFLSQNGIDFY
NNIIGGLPAFAGHEKIQGLNEFINQECQKDSELKSKLKNRHAFKM
AVLFKQILSDREKSFVIDEFESDAQVIDAVKNFYAEQCKDNNVIE
NLLNLIKNIAFLSDDELDGIFIEGKYLSSVSQKLYSDWSKLRNDI
EDSANSKQGNKELAKKIKTNKGDVEKAISKYEFSLSELNSIVHDN
TKESDLLSCTLHKVASEKLVKVNEGDWPKHLKNNEEKQKIKEPLD
ALLEIYNTLLIFNCKSENKNGNFYVDYDRCINELSSVVYLYNKTR
NYCTKKPYNTDKFKLNENSPQLGEGESKSKENDCLTLLEKKDDNY
YVGIIRKGAKINFDDTQAIADNIDNCIFKMNYELLKDAKKFIPKC
SIQLKEVKAHEKKSEDDYILSDKEKFASPLVIKKSTELLATAHVK
GKKGNIKKFQKEYSKENPTEYRNSLNEWIAFCKEFLKTYKAATIF
DITTLKKAEEYADIVEFYKDVDNLCYKLEFCPIKTSFIENLIDNG
DLYLERINNKDESSKSTGTKNLHTLYLQAIFDERNLNNPTIMLNG
GAELFYRKESIEQKNRITHKAGSILVNKVCKDGTSLDDKIRNEIY
QYENKFIDTLSDEAKKVLPNVIKKEATHDITKDKRFTSDKFFFHC
PLTINYKEGDTKQFNNEVLSFLRGNPDINIIGIDRGERNLIYVTV
INQKGEILDSVSENTVINKSSKIEQTVDYEEKLAVREKERIEAKR
SWDSISKIATLKEGYLSAIVHEICLLMIKHNAIVVLENLNAGFKR
IRGGLSEKSVYQKFEKMLINKLNYFVSKKESDWNKPSGLLNGLQL
SDQFESFEKLGIQSGFIFYVPAAYTSKIDPTTGFANVLNLSKVRN
VDAIKSFFSNFNEISYSKKEALFKESFDLDSLSKKGFSSFVKESK
SKWNVYTFGERIIKPKNKQGYREDKRINLTFEMKKLLNEYKVSED
LENNLIPNLTSANLKDTFWKELFFIFKTTLQLRNSVINGKEDVLI
SPVKNAKGEFFVSGTHNKTLPQDCDANGAYHIALKGLMILERNNL
VREEKDTKKIMAISNVDWFEYVQKRRGVL

[0132] In certain embodiments, a type V-A Cas nucleases comprises Csm1. Csm1 proteins are known in the art and are described in U.S. Pat. No. 9,896,696. Csm1 orthologs can be found in various bacterial and archaeal genomes. For example, in certain embodiments, a Csm1 protein is derived from Smithella sp. SCADC (Sm), Sulfuricurvum sp. (Ss), or Microgenomates (Roizmanbacteria) bacterium (Mb).

[0133] In certain embodiments, a type V-A Cas nuclease comprises SmCsm1 or a variant thereof. In certain embodiments, a type V-A Cas protein comprises an amino acid sequence at least 30%, 40%, 50%, 60%, 70%, 80%, 85%, 90%, 91%, 92%, 93%, 94%, 95%, 96%, 97%, 98%, 99%, or 100% identical to the amino acid sequence set forth in SEQ ID NO: 12 of International (PCT) Application Publication No. WO 2021/158918. In certain embodiments, a type V-A Cas protein comprises the amino acid sequence set forth in SEQ ID NO: 12 of International (PCT) Application Publication No. WO 2021/158918.

[0134] In certain embodiments, a type V-A Cas nuclease comprises SsCsm1 or a variant thereof. In certain embodiments, a type V-A Cas protein comprises an amino acid sequence at least 30%, 40%, 50%, 60%, 70%, 80%, 85%, 90%, 91%, 92%, 93%, 94%, 95%, 96%, 97%, 98%, 99%, or 100% identical to the amino acid sequence set forth in SEQ ID NO: 13 of International (PCT) Application Publication No. WO 2021/158918. In certain embodiments, a type V-A Cas protein comprises the amino acid sequence set forth in SEQ ID NO: 13 of International (PCT) Application Publication No. WO 2021/158918.

[0135] In certain embodiments, a type V-A Cas nuclease comprises MbCsm1 or a variant thereof. In certain embodiments, a type V-A Cas protein comprises an amino acid sequence at least 30%, 40%, 50%, 60%, 70%, 80%, 85%, 90%, 91%, 92%, 93%, 94%, 95%, 96%, 97%, 98%, 99%, or 100% identical to the amino acid sequence set forth in SEQ ID NO: 14 of International (PCT) Application Publication No. WO 2021/158918. In certain embodiments, a type V-A Cas protein comprises the amino acid sequence set forth in SEQ ID NO: 14 of International (PCT) Application Publication No. WO 2021/158918.

[0136] In certain embodiments, the type V-A Cas nuclease comprises an ART nuclease or a variant thereof. In general, such nucleases sequences have <60% AA sequence similarity to Cas12a, <60% AA sequence similarity to a positive control nuclease, and >80% query cover. In certain embodiments, the Type V-A nuclease comprises an ART1, ART2, ART3, ART4, ART5, ART6, ART7, ART8, ART9, ART10, ART11, ART12, ART13, ART14, ART15, ART16, ART17, ART18, ART19, ART20, ART21, ART22, ART23, ART24, ART25, ART26, ART27, ART28, ART28, ART30, ART31, ART32, ART33, ART34, ART35, or ART11* (i.e., ART11_L679F, i.e., ART11 wherein leucine (L) at amino acid position 679 is replaced with phenylalanine (F)) nuclease, as shown in Table 1. In certain embodiments, the type V-A Cas protein comprises an amino acid sequence at least 30%, 40%, 50%, 60%, 70%, 80%, 85%, 90%, 91%, 92%, 93%, 94%, 95%, 96%, 97%, 98%, 99%, or 100% identical to the amino acid sequence designated for the individual ART nuclease as shown in Table 1. In certain embodiments, provided is a nucleic acid-guided nuclease comprising a nucleic acid-guided nuclease polypeptide having at least 85% identity to an amino acid sequence represented by SEQ ID NOs: 1-36 or a nucleic acid encoding a nucleic acid-guided nuclease polypeptide comprising at least 85% identity with the polynucleotide represented by SEQ ID NOs: 1-36. In certain embodiments, provided is a nucleic acid-guided nuclease comprising a polypeptide having at least 90% identity to the amino acid sequence represented by SEQ ID NOs: 1-36, wherein the polypeptide does not contain a peptide motif of YLFQIYNKDF (SEQ ID NO: 39). In certain embodiments, provided is a nucleic acid-guided nuclease comprising a nucleic acid encoding a polypeptide having at least 90% identity to nucleic acids represented by SEQ ID NOs: 808-845 wherein an encoded polypeptide does not contain a peptide motif of YLFQIYNKDF (SEQ ID NO: 39). In certain embodiments, provided is a nucleic acid-guided nuclease wherein the polypeptide comprises at least 90% identity with the amino acid sequence represented by SEQ ID NOs: 1-9. In certain embodiments, provided is a nucleic acid-guided nuclease, wherein the polypeptide comprises a polypeptide comprising at least 90% identity with the amino acid sequence represented by SEQ ID NO: 2, 11, or 36.

TABLE 1
ART nucleases

| | SEQ | |
|---|---|---|
| | ID | |
| Name | NO | Amino Acid Sequence |
| ART1 | 1 | METFSGFTNLYPLSKTLRFRLIPVGETLKHFIDSGILEEDQHRAESYVK |
| | | VKAIIDDYHRAYIENSLSGFELPLESTKENSLEEYYLYHNIRNKTEEIQ |
| | | NLSSKVRTNLRKQVVAQLTKNEIFKRIDKKELIQSDLIDFVKNEPDANE |
| | | KIALISEFRNFTVYFKGEHENRRNMYSDEEKSTSIAFRLIHENLPKFID |
| | | NMEVFAKIQNTSISENFDAIQKELCPELVTLCEMEKLGYFNKTLSQKQI |
| | | DAYNTVIGGKTTSEGKKIKGLNEYINLYNQQHKQEKLPKMKLLFKQILS |
| | | DRESASWLPEKFENDSQVVGAIVNEWNTIHDTVLAEGGLKTIIASLGSY |
| | | GLEGIFLKNDLQLTDISQKATGSWGKISSEIKQKIEVMNPQKKKESYET |
| | | YQERIDKIFKSYKSFSLAFINECLRGEYKIEDYFLKLGAVNSSSLQKEN |
| | | HFSHILNTYTDVKEVIGLYSESTDTKLIQDNDSIQKIKQFLDAVKDLQA |
| | | YVKPLLGNGDETGKDERFYGDLIEYWSLLDLITPLYNMVRNYVTQKPYS |
| | | VDKIKINFQNPTLLNGWDLNKETDNTSVILRRDGKYYLAIMNNKSRKVF |
| | | LKYPSGTDRNCYEKMEYKLLPGANKMLPKVFFSKSRINEFMPNERLLSN |
| | | YEKGTHKKSGTCFSLDDCHTLIDFFKKSLDKHEDWKNFGFKESDTSTYE |
| | | DMSGFYKEVENQGYKLSFKPIDATYVDQLVDEGKIFLFQIYNKDESEHS |
| | | KGTPNMHTLYWKMLFDETNLGDVVYKLNGEAEVFFRKASINVSHPTHPA |
| | | NIPIKKKNLKHKDEERILKYDLIKDKRYTVDQFQFHVPITMNFKADGNG |
| | | NINQKAIDYLRSASDTHIIGIDRGERNLLYLVVIDGNGKICEQFSLNEI |
| | | EVEYNGEKYSTNYHDLLNVKENERKQARQSWQSIANIKDLKEGYLSQVI |
| | | HKISELMVKYNAIVVLEDLNAGFMRGRQKVEKQVYQKFEKKLIEKLNYL |
| | | VFKKQSSDLPGGLMHAYQLANKFESENTLGKQSGELFYIPAWNTSKMDP |
| | | VTGFVNLEDVKYESVDKAKSFFSKEDSIRYNVERDMFEWKENYGEFTKK |
| | | AEGTKTDWTVCSYGNRIITERNPDKNSQWDNKEINLTENIKLLFERFGI |
| | | DLSSNLKDEIMQRTEKEFFIELISLFKLVLQMRNSWTGTDIDYLVSPVC |
| | | NENGEFFDSRNVDETLPQNADANGAYNIARKGMILLDKIKKSNGEKKLA |
| | | LSITNREWLSFAQGCCKNG |
| ART2 | 2 | MLSNFTNQYQLSKTIRFELKPVGDILKHIEKSGLIAQDEIRSQEYQEVK |
| | | TIIDKYHKAFIDEALQNVVLSNLEEYEALFFERNRDEKAFEKLQAVERK |
| | | EIVAHFKQHPQYKTLFKKELIKADLKNWQELSDAEKELVSHEDNETTYF |
| | | TGEHENRANMYIDEAKHSSIAYRIIHENIPIFLINKKIFETIKQKAPHL |
| | | AQETQDALLEYLSGAIVEDMFELSYFNHLLSQTHIDLYNQMIGGVKQDS |
| | | LKIQGLNEKINLYRQANGLSKRELPNLKPLHKQILSDRETLSWIPESFE |
| | | SDEELMQGVQAYFESEVLAFECCDGKVNLLEKLPELLHQTQDYDESKVY |
| | | FKNDLALTAASQAIFKDYRIIKEALWEVNKPKKSKDLVADEEKFENKKN |
| | | SYFSIEQIDGALNSAQLSANMMHYFQSESTKVIEQIQLTYNDWKRNSSN |
| | | KELLKAFLDALLSYQRLLKPLNAPNDLEKDVAFYAYFDAYFTSLCGVVK |
| | | LYDKVRNFMIKKPYSLEKFKLNFENSTLLDGWDVNKESDNTAILFRKEG |
| | | LYYLGIMNKKYNKVERNISSSQDEGYQKIDYKLLPGANKMLPKVFESDK |
| | | NKEYFKPNAKLLERYKAGEHKKGDNFDLDECHELIDFEKTSIEKHQDWK |
| | | HFAYQFSPTESYEDISGFYREVEQQGYKISYKNIAASFIDTLVAEGKLY |
| | | FFQIYNKDFSPYSKGTPNMHTLYWRALFDEKNLADVIYKINGQAEIFER |
| | | KKSIEYSQEKLQKGHHHEMLKDKFAYPIIKDRREAFDKFQFHVPITINF |
| | | KAEGNENITPKTFEYIRSNPDNIKVIGIDRGERHLLYLSLIDAEGKIVE |
| | | QFTINQIINSYNGKDHVIDYHAKIDAKEKDRDKARKEWGIVENIKELKE |
| | | GYLSHVIHKIATLIIEHGAVVAMEDLNFGEKRGREKVEKQVYQKFEKAL |
| | | IDKLNYLVDKKKEPHKLGGLLNALQLTSKFQSFEKMGKQNGELFYVPAW |
| | | NTSKIDPVTGFVNLEDTRYASVEKSKAFFTKFQSICYNEAKDYFELVED |
| | | YNDFTEKAKETRSEWTLCTYGERIVSFRNAEKNHQWDSKTIHLTTEFKN |
| | | LEGELHGNDVKEYILEQNSVEFEKSLIYLLKITLQMRNSITGTDIDYLV |
| | | SPVADEAGNFYDSRKADTSLPKDADANGAYNIARKGIMIMHRIQNAEDL |
| | | KKVNLAISNRDWLRNAQGLDK |
| ART3 | 3 | MIDLKQFIGIYPVSKTLRFELRPVGKTQEWIEKNRVLEGDEQKAADYPV |
| | | VKKLIDDYHKVCIHDSLNHVHEDWEPLKDAIEIFQKTKSDEAKKRLEAE |
| | | QAMMRKKIAAAIKDFKHFKELTAATPSDLITSVLPEFSDDGSLKSERGE |
| | | ATYFSGFQENRNNIYSQEAISTGVPYRLVHDNFPKELSDLEVFERIKST |
| | | CPEVINQASAELQPFLEGVMIDDIFSLDFYNSLLTQNGIDFFNQVIGGV |
| | | SEKDKQKYRGINEFSNLYRQQHKEIAASKKAMTMIPLFKQILSDRDTLS |
| | | YIPAQIRTEDELVSSITQFYDHITHFEHDGKTINVLSEIVALLGKLDTY |
| | | DPNGICITARKLTDISQKVYGKWSVIEEKMKEKAIQQYGDISVAKNKKK |
| | | VDAFLSRKAYSLSDLCFDEEISESRYYSELPQTLNAISGYWLQFNEWCK |
| | | SDEKQKFLNNQTGTEVVKSLLDAMMELFHKCSVLVMPEEYEVDKSFYNE |
| | | FLPLYEELDTLFLLYNKVRNYLTQKPSDVKKEKLNFESPSLASGWDQNK |
| | | EMKNNAILLFKDGKSYLGVLNAKNKAKIKDAKGDVSSSSYKKMIYKLLS |
| | | DPSKDLPHKIFAKGNLDFYKPSEYILEGRELGKYKKGPNEDKKELHDFI |
| | | DFYKAAISIDPDWSKENFQYSPTESYDDIGMFFSEIKKQAYKIRFTDIS |
| | | EAQVNEWVDNGQLYLFQLYNKDYAEGAHGRKNLHTLYWENLFTDENLSN |
| | | LVLKLNGQAELFCRPQSIKKPVSHKIGSKMLNRRDKSGMPIPESIYRSL |
| | | YQYYNGKKKESELTVAEKQYIDQVIVKDVTHEIIKDRRYTRQEYFFHVP |
| | | LTFNANADGNEYINEHVLNYLKDNPDVNIIGIDRGERHLIYLTLINQRG |
| | | EILKQKTFNVVNSYNYQAKLEQREKERDEARKSWDSVGKIKDLKEGELS |
| | | AVIHEITNMMIENNAIVVLEDLNFGFKRGREKVERQVYQKFEKMLIDKL |
| | | NYLSFKDREAGEEGGILRGYQMAQKFISFQRLGKQSGELFYIPAAYTSK |
| | | IDPVSGFVNHENESDITNAEKRKDELMKMDRIEMKNGNIEFTFDYRKEK |
| | | TFQTDYQNVWTVSTFGKRIVMRIDEKGYKKMVDYEPTNDIIKAFKNKGI |
| | | LLSEGSDLKALIAEIEANATNAGFYSTLLYAFQKTLQMRNSNAVTEEDY |
| | | ILSPVAKDGHQFCSTDEANKGKDAQGNWVSKLPVDADANGAYHIALKGL |
| | | YLLRNPETKKIENEKWLQEMVEKPYLE |
| ART 4 | 4 | MSYNREKMEEKELGKNQNFQEFIGVSPLQKTLRNELIPTETTKKNIAQL |
| | | DLLTEDEVRAQNREKLKEMMDDYYRDVIDSTLRGELLIDWSYLFSCMRN |
| | | HLSENSKESKRELERTQDSVRSQIHDKFAERADFKDMFGASIITKLLPT |
| | | YIKQNSKYSERYDESVKIMKLYGKFTTSLTDYFETRKNIFSKEKISSAV |
| | | GYRIVEENAEIFLQNQNAYDRICKIAGLDLHGLDNEITAYVDGKTLKEV |
| | | CSDEGFAKVITQGGIDRYNEAIGAVNQYMNLLCQKNKALKPGQFKMKRL |
| | | HKQILCKGTTSFDIPKKFENDKQVYDAVNSFTEIVTKNNDLKRLLNITQ |
| | | NANDYDMNKIYVVADAYSMISQFISKKWNLIEECLLDYYSDNLPGKGNA |
| | | KENKVKKAVKEETYRSVSQLNEVIEKYYVEKTGQSVWKVESYISSLAEM |
| | | IKLELCHEIDNDEKHNLIEDDEKISEIKELLDMYMDVFHIIKVERVNEV |
| | | LNFDETFYSEMDEIYQDMQEIVPLYNHVRNYVTQKPYKQEKYRLYFHTP |
| | | TLANGWSKSKEYDNNAIILVREDKYYLGILNAKKKPSKEIMAGKEDCSE |
| | | HAYAKMNYYLLPGANKMLPKVFLSKKGIQDYHPSSYIVEGYNEKKHIKG |
| | | SKNEDIRFCRDLIDYFKECIKKHPDWNKENFEFSATETYEDISVFYREV |
| | | EKQGYRVEWTYINSEDIQKLEEDGQLFLFQIYNKDFAVGSTGKPNLHTL |
| | | YLKNLESEENLRDIVLKLNGEAEIFFRKSSVQKPVIHKCGSILVNRTYE |
| | | ITESGTTRVQSIPESEYMELYRYENSEKQIELSDEAKKYLDKVQCNKAK |
| | | TDIVKDYRYTMDKFFIHLPITINFKVDKGNNVNAIAQQYIAEQEDLHVI |
| | | GIDRGERNLIYVSVIDMYGRILEQKSENLVEQVSSQGTKRYYDYKEKLQ |
| | | NREEERDKARKSWKTIGKIKELKEGYLSSVIHEIAQMVVKYNAIIAMED |
| | | LNYGFKRGRFKVERQVYQKFETMLISKLNYLADKSQAVDEPGGILRGYQ |
| | | MTYVPDNIKNVGRQCGIIFYVPAAYTSKIDPTTGFINAFKRDVVSTNDA |
| | | KENFLMKEDSIQYDIEKGLFKFSFDYKNFATHKLTLAKTKWDVYTNGTR |
| | | IQNMKVEGHWLSMEVELTTKMKELLDDSHIPYEEGQNILDDLREMKDIT |
| | | TIVNGILEIFWLTVQLRNSRIDNPDYDRIISPVLNNDGEFFDSDEYNSY |
| | | IDAQKAPLPIDADANGAFCIALKGMYTANQIKENWVEGEKLPADCLKIE |
| | | HASWLAFMQGERG |
| ART5 | 5 | MSAVFKIKESTMKDFTHQYSLSKTLRFELKPVGETAERIEDFKNQGLKS |
| | | IVEEDRQRAEDYKKMKRILDDYHKEFIEEVLNDDIFTANEMESAFEVYR |
| | | KYMASKNDDKLKKEITEIFTDLRKKIAKAFENKSKEYCLYKGDESKLIN |
| | | EKKTGKDKGPGKLWYWLKAKADAGVNEFGDGQTFEQAEEALAKENNEST |
| | | YFTGENQNRDNIYTDAEQQTAISYRVINENMTRYEDNCIRYSSIENKYP |
| | | ELVKQLEPLSGKFAPGNYKDYLSQTAIDIYNEAVGHKSDDINAKGINQF |
| | | INEYRQRNSIKGRELPIMSVLYKQILSDINKDLIIDKFENAGELLDAVK |
| | | TLHRELTDKKILLKIKQTLNEFLTEDNSEDIYIKSGTDLTAVSNAIWGE |
| | | WSVIPKALEMYAENITDMNAKAREKWLKREAYHLKTVQEAIEAYLKDNE |
| | | EFETRNISEYFTNFKSGENDLIQVVQSAYAKMESIFGIEDEHKDRRPVT |
| | | ESGEPGEGFRQVELVREYLDSLINVEHFIKPLHMERSGKPIELEDCNSN |
| | | FYDPLNEAYKELDVVFGIYNKVRNYVTQKPYSKDKFKINFQNSTLLDGW |
| | | DVNKESANSSVLLLKNGKYYLGVMKQGASNILNYRPEPSDSKNKINAKK |
| | | QLSEIALAGATDDYYEKMIYKLLPDPAKMLPKVFFSAKNIEFYNPSQEI |
| | | IYIRENGLFKKDAGDKESLKKWIGEMKTSLLKHPEWGSYENFEFEPAED |
| | | YQDISIFYKQVAEQGYSVTEDKIKTSYIEEKVASGELYLFEIYNKDESP |
| | | HSKGRPNLHTMYWKSLFEKENLQNLVTKLNGEAEVFFRQHSIKRNEKVV |
| | | HRANRPIQNKNPLTEKKQSIFEYDLVKDRRFTKDKFFLHCPITLNFKEA |
| | | GPGRENDKVNKYIAGNPDIRIIGIDRGERHLLYYSLIDQSGRIVEQGTL |
| | | NQITSTLNSGGREIPKTTDYRGLLDTKEKERDKARKSWSMIENIKELKS |
| | | GYLSHIVHKLAKLMVKNNAVVVLEDLNFGEKRGREKVEKQVYQKFEKAL |
| | | IEKLNYLVFKDARPAEPGHYLNAYQLTAPLESFKKLGKQSGFIYYVPAW |
| | | NTSKIDPVTGFVNQFYIEKNSMQYLKNFFGKEDSIRENPDKNYFEFGED |
| | | YKNFHNKAAKSKWTICTHGDKRSWYNRKQRKLEIHNVTENLASLLSGKG |
| | | INFADGGSIKDKILSVDDASFFKSLAFNFKLTAQLRHTFEDNGEEIDCI |
| | | ISPVAAADGTFFCSETAKKLNMELPHDADANGAYNIARKGLMVLRQIRE |
| | | SGKPKPISNADWLDFAQQNED |
| ART6 | 6 | MQERKKISHLTHRNSVQKTIRMQLNPVGKTMDYFQAKQILENDEKLKEN |
| | | YQKIKEIADRFYRNLNEDVLSKTGLDKLKDYAEIYYHCNTDAERKRLDE |
| | | CASELRKEIVKNFKNRDEYNKLENKKMIEIVLPQHLKNEDEKEVVASFK |
| | | NFTTYFTGFFTNRKNMYSDGEESTAIAYRCINENLPKHLDNVKAFEKAI |
| | | SKLSKNAIDDLDATYSGLCGTNLYDVFTVDYENELLPQSGITEYNKIIG |
| | | GYTTSDGTKVKGINEYINLYNQQVSKRDKIPNLKILYKQILSESEKVSF |
| | | IPPKFEDDNELLSAVSEFYANDETFDGMPLKKAIDETKLLFGNLDNSSL |
| | | NGIYIQNDRSVINLSNSMFGSWSVIEDLWNKNYDSVNSNSRIKDIQKRE |
| | | DKRKKAYKAEKKLSLSFLQVLISNSENDEIREKSIVNYYKTSLMQLTDN |
| | | LSDKYNEAAPLLNKSYANEKGLKNDDKSISLIKNFLDAIKEIEKFIKPL |
| | | SETNITGEKNDLFYSQFTPLLDNISRIDILYDKVRNYVTQKPFSTDKIK |
| | | LNFGNSQLLNGWDRNKEKDCGAVWLCRDEKYYLAIIDKSNNSILENIDE |
| | | QDCDENDCYEKIIYKLLPGPNKMLPKVFFSEKCKKLLSPSDEILKIRKN |
| | | GTFKKGDKFSLDDCHKLIDFYKESFKKYPNWLIYNFKEKNTNEYNDIRE |
| | | FYNDVASQGYNISKMKIPTSFIDKLVDEGKIYLFQLYNKDESPHSKGTP |
| | | NLHTLYFKMLFDERNLEDVVYKLNGEAEMFYRPASIKYDKPTHPKNTPI |
| | | KNKNTLNDKKTSTFPYDLIKDKRYTKWQFSLHFPITMNFKAPDRAMIND |
| | | DVRNLLKSCNNNFIIGIDRGERNLLYVSVIDSNGAIIYQHSLNIIGNKE |
| | | KGKTYETNYREKLATREKERTEQRRNWKAIESIKELKEGYISQAVHVIC |
| | | QLVVKYDAIIVMEKLTDGFKRGRTKFEKQVYQKFEKMLIDKLNYYVDKK |
| | | LDPDEGGGLLHAYQLTNKLESFDKLGMQSGFIFYVRPDFTSKIDPVTGF |
| | | VNLLYPRYENIDKAKDMISREDDIGYNAGEDFFEFDIDYDKEPKTASDY |
| | | RKRWTICTNGERIEAFRNPAKNNEWSYRTIILAEKFKELEDNNSINYRD |
| | | SDDLKAEILSQTKGKFFEDFFKLLRLTLQMRNSNPETGEDRILSPVKDK |
| | | NGNFYDSSKYDEKSKLPCDADANGAYNIARKGLWIVEQFKKSDNVSTVG |
| | | PVIHNDKWLKFVQENDMANN |
| ART7 | 7 | MNILKENYMKEIKELTGLYSLTKTIGVELKPVGKTQELIEAKKLIEQDD |
| | | QRAEDYKIVKDIIDRYHKDFIDKCLNCVKIKKDDLEKYVSLAENSNRDA |
| | | EDFDKIKTKMRNQITEAFRKNSLFTNLFKKNLIKEYLPAFVSEEEKSVV |
| | | NKFSKFTTYFDAENDNRKNLYSGDAKSGTIAYRLIHENLPMELDNIASF |
| | | NAISGIGVNEYESSIETEFTDTLEGKRLTEFFQIDFENNTLTQKKIGNY |
| | | NYIVGAVNKAVNLYKQQHKTVRVPLLKPLYKMILSDRVTPSWLPERFES |
| | | DEEMLTAIKAAYESLREVLVGDNDESLRNLLLNIEHYDLEHIYIANDSG |
| | | LTSISQKIFGCYDTYTLAIKDQLQRDYPATKKQREAPDLYDERIDKLYK |
| | | KVGSFSIAYLNRLVDAKGHFTINEYYKQLGAYCREEGKEKDDFFKRIDG |
| | | AYCAISHLFFGEHGEIAQSDSDVELIQKLLEAYKGLQRFIKPLLGHGDE |
| | | ADKDNEFDAKLRKVWDELDIITPLYDKVRNWLSRKIYNPEKIKLCFENN |
| | | GKLLSGWVDSRTKSDNGTQYGGYIFRKKNEIGEYDFYLGISADTKLERR |
| | | DAAISYDDGMYERLDYYQLKSKTLLGNSYVGDYGLDSMNLLSAFKNAAV |
| | | KFQFEKEVVPKDKENVPKYLKRLKLDYAGFYQILMNDDKVVDAYKIMKQ |
| | | HILATLTSSIRVPAAIELATQKELGIDELIDEIMNLPSKSFGYFPIVTA |
| | | AIEEANKRENKPLFLFKMSNKDLSYAATASKGLRKGRGTENLHSMYLKA |
| | | LLGMTQSVEDIGSGMVFFRHQTKGLAETTARHKANEFVANKNKLNDKKK |
| | | SIFGYEIVKNKRFTVDKYLFKLSMNLNYSQPNNNKIDVNSKVREIISNG |
| | | GIKNIIGIDRGERNLLYLSLIDLKGNIVMQKSLNILKDDHNAKETDYKG |
| | | LLTEREGENKEARRNWKKIANIKDLKRGYLSQVVHIISKMMVEYNAIVV |
| | | LEDLNPGFIRGRQKIERNVYEQFERMLIDKLNFYVDKHKGANETGGLLH |
| | | ALQLTSEFKNFKKSEHQNGCLFYIPAWNTSKIDPATGFVNLENTKYTNA |
| | | VEAQEFFSKEDEIRYNEEKDWFEFEFDYDKFTQKAHGTRTKWTLCTYGM |
| | | RLRSFKNSAKQYNWDSEVVALTEEFKRILGEAGIDIHENLKDAICNLEG |
| | | KSQKYLEPLMQFMKLLLQLRNSKAGTDEDYILSPVADENGIFYDSRSCG |
| | | DQLPENADANGAYNIARKGLMLIEQIKNAEDLNNVKFDISNKAWINFAQ |
| | | QKPYKNG |
| ART8 | 8 | MAKENIFNELTGKYQLSKTLRLELKPVGNTQQMLKDEDVFEKDRIIREK |
| | | YRETRPHFDRLHREFIEQALKNQKLSDLGKYFQCLAKLQNNKKDKEAQE |
| | | EFKRISQNLRKEVNDLFKIDPLFGEGVFALLKEKYGEKDDAFLREQDGQ |
| | | YVLDENKKKISIFDSWKGFTGYFTKFQETRKNFYKDDGTATAVATRIID |
| | | QNLKRFCENIQIFKSIQKKVDFKEVEDNESVDLEDIFSLGFYSSCELQE |
| | | GIDVYNKILGGEPKTTGEKLRGLNELINRYRQDHKGEKLPFFKMLDKQI |
| | | LSEKEKFIESIEDDEELLKTLKEFYSSAEEKTTVLKELENDFIKNNENY |
| | | DLSEIYISREALNTISHRWVSAATLPEFEKSVYEVMKKDKPSGLSEDKD |
| | | DNSYKFPDFIALSYIKGSFEKLSGEKLWKDGYFRDETRNGDKGFLIGNE |
| | | SLWTQFIKIFEFEFNSLFEAKNTERSVGYYHFKKDFEKIITNDESVNPE |
| | | DKVIIREFADNVLAIYQMAKYFAIEKKRKWMDQYDTGDFYNHPDFGYKT |
| | | KFYDNAYEKIVKARMLLQSYLTKKPESTDKWKLNFECGYLLNGWSSSEN |
| | | TYGSLLFRTGNEYYLGVVNGSALRTEKIKRLTGNITEANSCHKMVYDFQ |
| | | KPDNKNVPRIFIRSKGDKFAPAVSELNLPVDSILEIYDKGLEKTENKNS |
| | | PFFKPSLKKLIDYFKLGFSRHASYKHYQFKWKDSSEYKNISEFYNDTIR |
| | | SCYQIKWEELNFEEVKKLTNSKDLFLFQIYNKDFSEKSTGNKNLHSIYF |
| | | DGLFLDNNINAQDGVILKLSGGGEIFFRPKTDVKKLGSRTDTKGKLVIK |
| | | NKRYSQDKIFLHEPIELNYSNTQESNENKLVRNFLADNPDINIIGVDRG |
| | | EKHLIYYAGIDQKGNTLKDKDDKDVLGSLNEINGVNYYKLLEERAKARE |
| | | KARQDWQNIQGIKDLKMGYISLVVRKLADLIIEYNAILVLEDLNMRFKQ |
| | | IHGGIEKSVYQQLEKALIEKLNFLVNKGEKDPERAGHLLRAYQLTAPES |
| | | TFKDMGKQTGVLFYTQASYTSKTCPQCGFRPNIKLHEDNLENAKKMLEK |
| | | INIVYKDNHFEIGYKVSDETKTEKTSRGNILYGDRQGKDTFVISSKAAI |
| | | RYKWFARNIKNNELNRGESLKEHTEKGVTIQYDITECLKILYEKNGIDH |
| | | SGDITKQSIRSELPAKFYKDLLFYLYLLTNTRSSISGTEIDYINCPDCG |
| | | FHSEKGENGCIFNGDANGAYNIARKGMLILKKINQYKDQHHTMDKMGWG |
| | | DLFIGIEEWDKYTQVVSRS |
| ART 9 | 9 | MKEIKELTGLYSLTKTIGVELKPVGKTQELIEAKKLIEQDDQRAEDYKI |
| | | VKDIIDRYHKDFIDKCLNCVKIKKDDLEKYVSLAENSNRDAEDEDKIKT |
| | | KMRNQITEAFRKNSLFTNLFKKNLIKEYLPAFVSEEEKSVVNKESKFTT |
| | | YFDAENDNRKNLYSGDAKSGTIAYRLIHENLPMELDNIASENAISGIGV |
| | | NEYFSSIETEFTDTLEGKRLTEFFQIDFENNTLTQKKIGNYNYIVGAVN |
| | | KAVNLYKQQHKTVRVPLLKPLYKMILSDRVTPSWLPERFESDEEMLTAI |
| | | KAAYESLREVLVGDNDESLRNLLLNIEHYDLEHIYIANDSGLTSISQKI |
| | | FGCYDTYTLAIKDQLQRDYPATKKQREAPDLYDERIDKLYKKVGSESIA |
| | | YLNRLVDAKGHETINEYYKQLGAYCREEGKEKDDFFKRIDGAYCAISHL |
| | | FFGEHGEIAQSDSDVELIQKLLEAYKGLQRFIKPLLGHGDEADKDNEED |
| | | AKLRKVWDELDIITPLYDKVRNWLSRKIYNPEKIKLCFENNGKLLSGWV |
| | | DSRTKSDNGTQYGGYIFRKKNEIGEYDFYLGISADTKLERRDAAISYDD |
| | | GMYERLDYYQLKSKTLLGNSYVGDYGLDSMNLLSAFKNAAVKFQFEKEV |
| | | VPKDKENVPKYLKRLKLDYAGFYQILMNDDKVVDAYKIMKQHILATLTS |
| | | SIRVPAAIELATQKELGIDELIDEIMNLPSKSEGYFPIVTAAIEEANKR |
| | | ENKPLFLFKMSNKDLSYAATASKGLRKGRGTENLHSMYLKALLGMTQSV |
| | | FDIGSGMVFFRHQTKGLAETTARHKANEFVANKNKLNDKKKSIFGYEIV |
| | | KNKRFTVDKYLFKLSMNLNYSQPNNNKIDVNSKVREIISNGGIKNIIGI |
| | | DRGERNLLYLSLIDLKGNIVMQKSLNILKDDHNAKETDYKGLLTEREGE |
| | | NKEARRNWKKIANIKDLKRGYLSQVVHIISKMMVEYNAIVVLEDLNPGE |
| | | IRGRQKIERNVYEQFERMLIDKLNFYVDKHKGANETGGLLHALQLTSEF |
| | | KNFKKSEHQNGCLFYIPAWNTSKIDPATGFVNLENTKYTNAVEAQEFFS |
| | | KFDEIRYNEEKDWFEFEFDYDKFTQKAHGTRTKWTLCTYGMRLRSEKNS |
| | | AKQYNWDSEVVALTEEFKRILGEAGIDIHENLKDAICNLEGKSQKYLEP |
| | | LMQFMKLLLQLRNSKAGTDEDYILSPVADENGIFYDSRSCGDQLPENAD |
| | | ANGAYNIARKGLMLIEQIKNAEDLNNVKEDISNKAWINFAQQKPYKNG |
| ART10 | 10 | MNFQPFFQKFVHLYPISKTLRFELIPQGATQKFISEKQVLLQDEIRARK |
| | | YPEMKQAIDGYHKDFIQRALSNIDSQVFEQALNTFEDLFLRSQAERATD |
| | | AYKKDFETAQTKLRELIVHSFEKGEFKQEYKSLFDKNLITNLLKPWVEQ |
| | | QNQIGDSNYTYHEDENKFTTYFLGFHENRKNIYSKDPHKTALAYRLIHE |
| | | NLPKFLENNKILLKIQNDHPSLWEQLQTLNQTMPQLEDGWDESQLMQVS |
| | | FFSNTLTQTGIDQYNTIIGGISEGENRQKIQGINELINLYNQKQDKKNR |
| | | VAKLKQLYKQILSDRSTLSFLPEKFVDDTELYHAINMFYLEHLHHQSMI |
| | | NGHSYTLLERVQLLINELANYDLSKVYLAPNQLSTVSHQMEGDEGYIGR |
| | | ALNYYYMQVIQPDYEQLLASAKTTKKIEATEKLKTIFLDTPQSLVVIQA |
| | | AIDEYIQLQPSTKPHTQLTDFIISLLKQYETVADDQSIKVINVESDIEG |
| | | KYSCIKGLVNTKSESKREVLQDEKLATDIKAFMDAVNNVIKLLKPFSLN |
| | | EKLVASVEKDARFYSDFEEIYQSLLIFVPLYNKVRNYITQKPYSTEKFK |
| | | LNFNKPTLLSGWDANKEADNLSILLRKNGNYYLAIMDTAKGANKAFEPK |
| | | TLNQLKVDDTTDCYEKMVYKLLSGPSKMFPKAFKAKNNEGNYYPTPELL |
| | | TSYNNNEHLKNDKNFTLASLHAYIDWCKEYINRNPSWHQENFKESPTQS |
| | | FQDISQFYSEVSSQSYKVHFQTIPSDYIDQLVAEGKLYLFQIYNKDESP |
| | | NAKGKENLHTLYFKALFSDENLKQPVFKLSGEAEMFYRPASLQLANTTI |
| | | HKAGEPMAAKNPLTPNATRTLAYDIIKDRRFTTDKYLLHVPISLNFHAQ |
| | | ESMSIKKHNDLVRQMIKHNHQDLHVIGIDRGEKHLLYVSVIDLKGNIVY |
| | | QESLNSIKSEAQNFETPYHQLLQHREEGRAQARTAWGKIENIKELKDGY |
| | | LSQVVHRIQQLILKYNAIVMLEDLNFGEKRGRFKIEKQIYQKFEKALIH |
| | | KLNYVVDKSTQADELGGVRKAYQLTAPFESFEKLGKQSGVLFYVPAWNT |
| | | SKIDPVTGFVDLLKPKYENLDKAQAFFNAFDSIHYNAQKNYFEFKVNLK |
| | | QFAGLKAQAAQAEWTICSYGDERHVYQKKNAQQGETVIVNVTEELKVLF |
| | | AKNNIEVAQSVELKETICTQTQVDFFKRLMWLLQVLLALRYSSSKDKLD |
| | | YILSPVANAQGEFFDSRHASVQLPQDSDANGAYHIALKGLWVIEQLKAA |
| | | DNLDKVKLAISNDDWLHFAQQKPYLA |
| ART11 | 11 | MYYQGLTKLYPISKTIRNELIPVGKTLEHIRMNNILEADIQRKSDYERV |
| | | KKLMDDYHKQLINESLQDVHLSYVEEAADLYLNASKDKDIVDKESKCQD |
| | | KLRKEIVNLLKSHENFPKIGNKEIIKLLQSLSDTEKDYNALDSFSKFYT |
| | | YFTSYNEVRKNLYSDEEKSSTAAYRLINENLPKELDNIKAYSIAKSAGV |
| | | RAKELTEEEQDCLFMTETFERTLTQDGIDNYNELIGKLNFAINLYNQQN |
| | | NKLKGFRKVPKMKELYKQILSEREASFVDEFVDDEALLTNVESESAHIK |
| | | EFLESDSLSRFAEVLEESGGEMVYIKNDTSKTTFSNIVEGSWNVIDERL |
| | | AEEYDSANSKKKKDEKYYDKRHKELKKNKSYSVEKIVSLSTETEDVIGK |
| | | YIEKLQADIIAIKETREVFEKVVLKEHDKNKSLRKNTKAIEAIKSELDT |
| | | IKDFERDIKLISGSEHEMEKNLAVYAEQENILSSIRNVDSLYNMSRNYL |
| | | TQKPFSTEKEKLNENRATLLNGWDKNKETDNLGILLVKEGKYYLGIMNT |
| | | KANKSFVNPPKPKTDNVYHKVNYKLLPGPNKMLPKVFFAKSNLEYYKPS |
| | | EDLLAKYQAGTHKKGENFSLEDCHSLISFFKDSLEKHPDWSEFGFKESD |
| | | TKKYDDLSGFYREVEKQGYKITYTDIDVEYIDSLVEKDELYLFQIYNKD |
| | | FSPYSKGNYNLHTLYLTMLFDERNLRNVVYKLNGEAEVFYRPASIGKDE |
| | | LIIHKSGEEIKNKNPKRAIDKPTSTFEYDIVKDRRYTKDKEMLHIPVTM |
| | | NFGVDETRRENEVVNDAIRGDDKVRVIGIDRGERNLLYVVVVDSDGTIL |
| | | EQISLNSIINNEYSIETDYHKLLDEKEGDRDRARKNWTTIENIKELKEG |
| | | YLSQVVNVIAKLVLKYDAIICLEDLNFGEKRGRQKVEKQVYQKFEKMLI |
| | | DKLNYLVIDKSRSQENPEEVGHVLNALQLTSKFTSFKELGKQTGIIYYV |
| | | PAYLTSKIDPTTGFANLFYVKYESVEKSKDFENREDSICENKVAGYFEF |
| | | SFDYKNFTDRACGMRSKWKVCTNGERIIKYRNEEKNSSFDDKVIVLTEE |
| | | FKKLFNEYGIAFNDCMDLTDAINAIDDASFERKLTKLFQQTLQMRNSSA |
| | | DGSRDYIISPVENDNGEFFNSEKCDKSKPKDADANGAFNIARKGLWVLE |
| | | QLYNSSSGEKLNLAMTNAEWLEYAQQHTI |
| ART12 | 12 | MAKNFEDFKRLYPLSKTLRFEAKPIGATLDNIVKSGLLEEDEHRAASYV |
| | | KVKKLIDEYHKVFIDRVLDNGCLPLDDKGDNNSLAEYYESYVSKAQDED |
| | | AIKKEKEIQQNLLSIIAKKLTDDKAYANLEGNKLIESYKDKADKTKLID |
| | | SDLIQFINTAESTQLVSMSQDEAKELVKEFWGETTYFEGFFKNRKNMYT |
| | | PEEKSTGIAYRLINENLPKFIDNMEAFKKAIARPEIQANMEELYSNESE |
| | | YLNVESIQEMFLLDYYNMLLTQKQIDVYNAIIGGKTDDEHDVKIKGINE |
| | | YINLYNQQHKDDKLPKLKALFKQILSDRNAISWLPEEENSDQEVLNAIK |
| | | DCYERLAENVLGDKVLKSLLGSLADYSLDGIFIRNDLQLTDISQKMEGN |
| | | WGVIQNAIMQNIKHVAPARKHKESEEDYEKRIAGIFKKADSESISYIND |
| | | CLNEADPNNAYFVENYFATFGAVNTPTMQRENLFALVQNAYTEVAALLH |
| | | SDYPTVKHLAQDKANVSKIKALLDAIKSLQHFVKPLLGKGDESDKDERF |
| | | YGELASLWAELDTVTPLYNMIRNYMTRKPYSQKKIKLNFENPQLLGGWD |
| | | ANKEKDYATIILRRNGLYYLAIMDKDSRKLLGKAMPSDGECYEKMVYKF |
| | | FKDVTTMIPKCSTQLKDVQAYFKVNTDDYVLNSKAFNRPLTITKEVEDL |
| | | NNVLYGKYKKFQKGYLTATGDNVGYTHAVNVWIKFCMDELDSYDSTCIY |
| | | DESSLKPESYLSLDSFYQDVNLLLYKLSFTDVSASFIDQLVEEGKMYLE |
| | | QIYNKDFSEYSKGTPNMHTLYWKALFDERNLADVVYKLNGQAEMFYRKK |
| | | SIENTHPTHPANHPILNKNKDNKKKESLFEYDLIKDRRYTVDKEMFHVP |
| | | ITMNEKSSGSENINQDVKAYLRHADDMHIIGIDRGERHLLYLVVIDLQG |
| | | NIKEQFSLNEIVNDYNGNTYHTNYHDLLDVREDERLKARQSWQTIENIK |
| | | ELKEGYLSQVIHKITQLMVRYHAIVVLEDLSKGFMRSRQKVEKQVYQKE |
| | | EKMLIDKLNYLVDKKTDVSTPGGLLNAYQLTCKSDSSQKLGKQSGFLFY |
| | | IPAWNTSKIDPVTGFVNLLDTHSLNSKEKIKAFFSKEDAIRYNKDKKWE |
| | | EFNLDYDKFGKKAEDTRTKWTLCTRGMRIDTFRNKEKNSQWDNQEVDLT |
| | | TEMKSLLEHYYIDIHGNLKDAISTQTDKAFFTGLLHILKLTLQMRNSIT |
| | | GTETDYLVSPVADENGIFYDSRSCGDQLPENADANGAYNIARKGLMLVE |
| | | QIKDAEDLDNVKEDISNKAWLNFAQQKPYKNG |
| ART13 | 13 | MAKNFEDFKRLYSLSKTLRFEAKPIGATLDNIVKSGLLDEDEHRAASYV |
| | | KVKKLIDEYHKVFIDRVLDDGCLPLENKGNNNSLAEYYESYVSRAQDED |
| | | AKKKFKEIQQNLRSVIAKKLTEDKAYANLEGNKLIESYKDKEDKKKIID |
| | | SDLIQFINTAESTQLDSMSQDEAKELVKEFWGFVTYFYGFFDNRKNMYT |
| | | AEEKSTGIAYRLVNENLPKFIDNIEAFNRAITRPEIQENMGVLYSDESE |
| | | YLNVESIQEMFQLDYYNMLLTQKQIDVYNAIIGGKTDDEHDVKIKGINE |
| | | YINLYNQQHKDDKLPKLKALFKQILSDRNAISWLPEEFNSDQEVLNAIK |
| | | DCYERLAENVLGDKVLKSLLGSLADYSLDGIFIRNDLQLTDISQKMFGN |
| | | WGVIQNAIMQNIKRVAPARKHKESEEDYEKRIAGIFKKADSESISYIND |
| | | CLNEADPNNAYFVENYFATFGAVNTPTMQRENLFALVQNAYTEVAALLH |
| | | SDYPTVKHLAQDKANVSKIKALLDAIKSLQHFVKPLLGKGDESDKDERF |
| | | YGELASLWAELDTVTPLYNMIRNYMTRKPYSQKKIKLNFENPQLLGGWD |
| | | ANKEKDYATIILRRNGLYYLAIMDKDSRKLLGKAMPSDGECYEKMVYKF |
| | | FKDVTTMIPKCSTQLKDVQAYFKVNTDDYVLNSKAFNKPLTITKEVEDL |
| | | NNVLYGKYKKFQKGYLTATGDNVGYTHAVNVWIKFCMDELNSYDSTCIY |
| | | DESSLKPESYLSLDAFYQDANLLLYKLSFARASVSYINQLVEEGKMYLE |
| | | QIYNKDFSEYSKGTPNMHTLYWKALFDERNLADVVYKLNGQAEMFYRKK |
| | | SIENTHPTHPANHPILNKNKDNKKKESLFDYDLIKDRRYTVDKEMFHVP |
| | | ITMNFKSVGSENINQDVKAYLRHADDMHIIGIDRGERHLLYLVVIDLQG |
| | | NIKEQYSLNEIVNEYNGNTYHTNYHDLLDVREEERLKARQSWQTIENIK |
| | | ELKEGYLSQVIHKITQLMVRYHAIVVLEDLSKGEMRSRQKVEKQVYQKE |
| | | EKMLIDKLNYLVDKKTDVSTPGGLLNAYQLTCKSDSSQKLGKQSGELFY |
| | | IPAWNTSKIDPVTGFVNLLDTHSLNSKEKIKAFFSKEDAIRYNKDKKWE |
| | | EFNLDYDKFGKKAEDTRTKWTLCTRGMRIDTERNKEKNSQWDNQEVDLT |
| | | TEMKSLLEHYYIDIHGNLKDAISAQTDKAFFTGLLHILKLTLQMRNSIT |
| | | GTETDYLVSPVADENGIFYDSRSCGNQLPENADANGAYNIARKGLMLIE |
| | | QIKNAEDLNNVKFDISNKAWINFAQQKPYKNG |
| ART14 | 14 | MAKNFEDFKRLYSLSKTLRFEAKPIGATLDNIVKSDLLDEDEHRAASYV |
| | | KVKKLIDEYHKVFIDRVLDDGCLPLENKGNNNSLAEYYESYVSRAQDED |
| | | AKKKFKEIQQNLRSVIAKKLTEDKAYANLFGNKLIESYKDKEDKKKIID |
| | | SDLIQFINTAESTQLDSMSQDEAKELVKEFWGFVTYFYGFFDNRKNMYT |
| | | AEEKSTGIAYRLVNENLPKFIDNIEAFNRAITRPEIQENMGVLYSDESE |
| | | YLNVESIQEMFQLDYYNMLLTQKQIDVYNAIIGGKTDDEHDVKIKGIND |
| | | YINLYNQKHKDDKLPKLKALFKQILSDRNAISWLPEEFNSDQEVLNAIK |
| | | DCYERLSENVLGDKVLKSMLGSLADYSLDGIFIRNDLQLTDISQKMEGN |
| | | WSVIQNAIMQNIKHVAPARKHKESEEEYENRIAGIFKKADSESISYIDA |
| | | CLNETDPNNAYFVENYFATLGAVDTPTMQRENLFALVQNAYTEITALLH |
| | | SDYPTEKNLAQDKANVAKIKALLDAIKSLQHFVKPLLGKGDESDKDERF |
| | | YGELASLWAELDTMTPLYNMIRNYMTRKPYSQKKIKLNFENPQLLGGWD |
| | | ANKEKDYATIILRRNGLYYLAIMNKDSKKLLGKAMPSDGECYEKMVYKL |
| | | LPGANKMLPKVFFAKSRMEDFKPSKELVEKYYNGTHKKGKNFNIQDCHN |
| | | LIDYFKQSIDKHEDWSKFGFKESDTSTYEDLSGFYREVEQQGYKLSFAR |
| | | VSVSYINQLVEEGKMYLFQIYNKDFSEYSKGTPNMHTLYWKALFDERNL |
| | | ADVVYKLNGQAEMFYRKKSIENTHPTHPANHPILNKNKDNKKKESLEGY |
| | | DLIKDRRYTVDKFLFHVPITMNFKSSGSENINQDVKAYLRHADDMHIIG |
| | | IDRGERHLLYLVVIDLQGNIKEQFSLNEIVNDYNGNTYHTNYHDLLDVR |
| | | EDERLKARQSWQTIENIKELKEGYLSQVIHKITQLMVKYHAIVVLEDLN |
| | | MGFMRGRQKVEKQVYQKFEKMLIEKLNYLVDKKADASVSGGLLNAYQLT |
| | | SKEDSFQKLGKQSGFLFYIPAWNTSKIDPVTGFVNLLDTRYQNVEKAKS |
| | | FFSKFDAIRYNKDKEWFEFNLDYDKFGKKAEGTRTKWTLCTRGMRIDTE |
| | | RNKEKNSQWDNQEVDLTAEMKSLLEHYYIDIHSNLKDAISAQTDKAFFT |
| | | GLLHILKLTLQMRNSITGTETDYLVSPVVDENGIFYDSRSCGDELPENA |
| | | DANGAYNIARKGLMMIEQIKDAKDLDNLKFDISNKAWLNFAQQKPYKNG |
| ART15 | 15 | MLFQDFTHLYPLSKTVRFELKPIGRTLEHIHAKNELSQDETMADMYQKV |
| | | KVILDDYHRDFIADMMGEVKLTKLAEFYDVYLKFRKNPKDDELQKQLKD |
| | | LQAVLRKESVKPIGNGGKYKAGHDRLFGAKLFKDGKELGDLAKEVIAQE |
| | | GKSSPKLAHLAHFEKESTYFTGFHDNRKNMYSDEDKHTAIAYRLIHENL |
| | | PRFIDNLQILTTIKQKHSALYDQIINELTASGLDVSLASHLDGYHKLLT |
| | | QEGITAYNRIIGEVNGYTNKHNQICHKSERIAKLRPLHKQILSDGMGVS |
| | | FLPSKFADDSEMCQAVNEFYRHYADVFAKVQSLEDGEDDHQKDGIYVEH |
| | | KNLNELSKQAFGDFALLGRVLDGYYVDVVNPEFNERFAKAKTDNAKAKL |
| | | TKEKDKFIKGVHSLASLEQAIKHHTARHDDESVQAGKLGQYFKHGLAGV |
| | | DNPIQKIHNNHSTIKGFLERERPAGERALPKIKSGKNPEMTQLRQLKEL |
| | | LDNALNVAHFAKLLMTKTTLDNQDGNFYGEFGVLYDELAKIPTLYNKVR |
| | | DYLSQKPFSTEKYKLNFGNPTLLNGWDLNKEKDNFGVILQKDGCYYLAL |
| | | LDKAHKKVFDNAPNTGKNVYQKMIYKLLPGPNKMLPRVEFAKSNLDYYN |
| | | PSAELLDKYAQGTHKKGDNFNLKDCHALIDFFKAGINKHPEWQNFGFKF |
| | | SPTSSYRDLSDFYREVEPQGYQVKFVDINADYIDELVEQGQLYLFQIYN |
| | | KDESPKAHGKPNLHTLYFRALESEDNLANPIYKLNGEAQIFYRKASLGM |
| | | NETTIHRAGEILENKNPDNPKERVFTYDIIKDRRYTQDKEMLHVPITMN |
| | | FGVQGMTIKEFNKKVNQSIRQYDDVNVIGIDRGERHLLYLTVINSKGEI |
| | | LEQRSLNDITTASANGTQMTTPYHKILDKREIERLNARVGWGEIETIKE |
| | | LKSGYLSHVVHQVSQLMLKYNAIVVLEDLNFGEKRGREKVEKQIYQNFE |
| | | NALIKKLNHLELKDKADDEIGSYKNALQLTNNFTDLKNIGKQTGELFYV |
| | | PAWNTSKIDPETGFVDLLKPRYENIAQSQAFFGKEDKICYNADKDYFEF |
| | | HIDYAKFTDKAKNSRQTWTICSHGDKRYVYDKTANQNKGATKGINVNDE |
| | | LKSLFARYHINEKQPNLVMDICQNNDKEFHKSLMYLLKTLLALRYSNAS |
| | | SDEDFILSPVANDEGVFENSALADDTQPQNADANGAYHIALKGLWLLNE |
| | | LKNSDDLNKVKLAIDNQTWLNFAQNR |
| ART16 | 16 | MLFQDFTHLYPLSKTVRFELKPIGKTLEHIHAKNFLSQDETMADMYQKV |
| | | KAILDDYHRDFITKMMSEVTLTKLPEFYEVYLALRKNPKDDTLQKQLTE |
| | | IQTALREEVVKPIDSGGKYKAGYERLFGAKLFKDGKELGDLAKEVIAQE |
| | | GESSPKLPQIAHFEKESTYFTGFHDNRKNMYSSDDKHTAIAYRLIHENL |
| | | PRFIDNLQILVTIKQKHSVLYDQIVNELNANGLDVSLASHLDGYHKLLT |
| | | QEGITAYNRIIGEVNSYTNKHNQICHKSERIAKLRPLHKQILSDGMGVS |
| | | FLPSKFADDSEMCQAVNEFYRHYAHVFAKVQSLEDREDDYQKDGIYVEH |
| | | KNLNELSKQAFGDFALLGRVLDGYYVDVVNPEENDKFAKAKTDNAKEKL |
| | | TKEKDKFIKGVHSLASLEQAIEHYIAGHDDESVQAGKLGQYFKHGLAGV |
| | | DNPIQKIHNSHSTIKGFLERERPAGERTLPKIKSDKSLEMTQLRQLKEL |
| | | LDNALNVVHFAKLLTTKTTLDNQDGNFYGEFGALYDELAKIATLYNKVR |
| | | DYLSQKPFSTEKYKLNFGNPTLLNGWDLNKEKDNFGVILQKDGCYYLAL |
| | | LDKAHKKVEDNAPNTGKSVYQKMVYKLLPGPNKMLPKVFFAKSNLDYYN |
| | | PSAELLDKYAQGTHKKGDNENLKDCHALIDFFKASINKHPEWQHFGFEF |
| | | SLTSSYQDLSDFYREVEPQGYQVKFVDIDADYIDELVEQGQLYLFQIYN |
| | | KDFSPKAHGKPNLHTLYFKALFSEDNLANPIYKLNGEAEIFYRKASLDM |
| | | NETTIHRAGEVLENKNPDNPKERQFVYDIIKDKRYTQDKEMLHVPITMN |
| | | FGVQGMTIKEFNKKVNQSIQQYDEVNVIGIDRGERHLLYLTVINSKGEI |
| | | LEQRSLNDIITTSANGTQMTTPYHKILDKREIERLNARVGWGEIETIKE |
| | | LKSGYLSHVVHQISQLMLKYNAIVVLEDLNFGEKRGREKVEKQIYQNFE |
| | | NALIKKLNHLVLKDKADNEIGSYKNALQLTNNFTDLKSIGKQTGFLFYV |
| | | PAWNTSKIDPVTGFVDLLKPRYENIAQSQAFEDKEDKICYNADKGYFEF |
| | | HIDYAKFTDKAKNSRQIWTICSHGDKRYVYDKTANQNKGATIGINVNDE |
| | | LKSLFARYRINDKQPNLVMDICQNNDKEFHKSLTYLLKALLALRYSNAS |
| | | SDEDFILSPVANDKGVFFNSALADDTQPQNADANGAYHIALKGLWLLNE |
| | | LKNSDDLDKVKLAIDNQTWLNFAQNR |
| ART17 | 17 | MLFQDFTHLYPLSKTVRFELKPIGKTLEHIHAKNELSQDETMADMYQKV |
| | | KAILDDYHRDFITKMMSEVTLTKLPEFYEVYLALRKNPKDDTLQKQLTE |
| | | IQTALREEVVKPIDSGGKYKAGYERLFGAKLFKDGKELGDLAKFVIAQE |
| | | GESSPKLPQIAHFEKESTYFTGFHDNRKNMYSSDDKHTAIAYRLIHENL |
| | | PRFIDNLQILVTIKQKHSVLYDQIVNELNANGLDVSLASHLDGYHKLLT |
| | | QEGITAYNRIIGEVNSYTNKHNQICHKSERIAKLRPLHKQILSDGMGVS |
| | | FLPSKFADDSEMCQAVNEFYRHYAHVFAKVQSLFDREDDYQKDGIYVEH |
| | | KNLNELSKQAFGDFALLGRVLDGYYVDVVNPEENDKFAKAKTDNAKEKL |
| | | TKEKDKFIKGVHSLASLEQAIEHYIAGHDDESVQAGKLGQYFKHGLAGV |
| | | DNPIQKIHNSHSTIKGFLERERPAGERTLPKIKSDKSLEMTQLRQLKEL |
| | | LDNALNVVHFAKLLTTKTTLDNQDGNFYGEFGALYDELAKIATLYNKVR |
| | | DYLSQKPFSTEKYKLNFGNPTLLNGWDLNKEKDNFGVILQKDGCYYLAL |
| | | LDKAHKKVEDNAPNTGKSVYQKMVYKLLPGSNKMLPKVFFAKSNLDYYN |
| | | PSAELLDKYAQGTHKKGDNENLKDCHALIDFFKASINKHPEWQHEGFEF |
| | | SLTSSYQDLSDFYREVEPQGYQVKFVDIDADYIDELVEQGQLYLFQIYN |
| | | KDESPKAHGKPNLHTLYFKALFSEDNLANPIYKLNGEAEIFYRKASLDM |
| | | NETTIHRAGEVLENKNPDNPKERQFVYDIIKDKRYTQDKEMLHVPITMN |
| | | FGVQGMTIKEFNKKVNQSIQQYDEVNVIGIDRGERHLLYLTVINSKGEI |
| | | LEQRSLNDIITTSANGTQMTTPYHKILDKREIERLNARVGWGEIETIKE |
| | | LKSGYLSHVVHQISQLMLKYNAIVVLEDLNFGFKRGREKVEKQIYQNFE |
| | | NALIKKLNHLVLKDKADNEIGSYKNALQLTNNFTDLKSIGKQTGELFYV |
| | | PAWNTSKIDPVTGFVDLLKPRYENIAQSQAFEDKEDKICYNADKGYFEF |
| | | HIDYAKFTDKAKNSRQIWTICSHGDKRYVYDKTANQNKGATIGINVNDE |
| | | LKSLFARYRINDKQPNLVMDICQNNDKEFHKSLTYLLKALLALRYSNAS |
| | | SDEDFILSPVANDKGVFFNSALADDTQPQNADANGAYHIALKGLWLLNE |
| | | LKNSDDLDKVKLAIDNQTWLNFAQNR |
| ART18 | 18 | MKYTDFTGIYPVSKTLRFELIPQGSTVENMKREGILNNDMHRADSYKEM |
| | | KKLIDEYHKVFIERCLSDESLKYDDTGKHDSLEEYFFYYEQKRNDKTKK |
| | | IFEDIQVALRKQISKRFTGDTAFKRLEKKELIKEDLPSFVKNDPVKTEL |
| | | IKEFSDFTTYFQEFHKNRKNMYTSDAKSTAIAYRIINENLPKFIDNINA |
| | | FHIVAKVPEMQEHFKTIADELRSHLQVGDDIDKMENLQFENKVLTQSQL |
| | | AVYNAVIGGKSEGNKKIQGINEYVNLYNQQHKKARLPMLKLLYKQILSD |
| | | RVAISWLQDEFDNDQDMLDTIEAFYNKLDSNETGVLGEGKLKQILMGLD |
| | | GYNLDGVFLRNDLQLSEVSQRLCGGWNIIKDAMISDLKRSVQKKKKETG |
| | | ADFEERVSKLFSAQNSFSIAYINQCLGQAGIRCKIQDYFACLGAKEGEN |
| | | EAETTPDIFDQIAEAYHGAAPILNARPSSHNLAQDIEKVKAIKALLDAL |
| | | KRLQRFVKPLLGRGDEGDKDSFFYGDEMPIWEVLDQLTPLYNKVRNRMT |
| | | RKPYSQEKIKLNFENSTLLNGWDLNKEHDNTSVILRREGLYYLGIMNKN |
| | | YNKIFDANNVETIGDCYEKMIYKLLPGPNKMLPKVFFSKSRVQEFSPSK |
| | | KILEIWESKSFKKGDNENLDDCHALIDFYKDSIAKHPDWNKENEKESDT |
| | | QSYTNISDFYRDVNQQGYSLSFTKVSVDYVNRMVDEGKLYLFQIYNKDE |
| | | SPQSKGTPNMHTLYWRMLFDERNLHNVIYKLNGEAEVFYRKASLRCDRP |
| | | THPAHQPITCKNENDSKRVCVEDYDIIKNRRYTVDKEMFHVPITINYKC |
| | | TGSDNINQQVCDYLRSAGDDTHIIGIDRGERNLLYLVIIDQHGTIKEQF |
| | | SLNEIVNEYKGNTYCTNYHTLLEEKEAGNKKARQDWQTIESIKELKEGY |
| | | LSQVIHKISMLMQRYHAIVVLEDLNGSFMRSRQKVEKQVYQKFEHMLIN |
| | | KLNYLVNKQYDAAEPGGLLHALQLTSRMDSFKKLGKQSGELFYIPAWNT |
| | | SKIDPVTGFVNLEDTRYCNEAKAKEFFEKEDDISYNDERDWFEFSFDYR |
| | | HFTNKPTGTRTQWTLCTQGTRVRTERNPEKSNHWDNEEFDLTQAFKDLE |
| | | NKYGIDIASGLKARIVNGQLTKETSAVKDFYESLLKLLKLTLQMRNSVT |
| | | GTDIDYLVSPVADKDGIFFDSRTCGSLLPANADANGAFNIARKGLMLLR |
| | | QIQQSSIDAEKIQLAPIKNEDWLEFAQEKPYL |
| ART19 | 19 | METFSGFTNLYPLSKTLRERLIPVGETLKYFIGSGILEEDQHRAESYVK |
| | | VKAIIDDYHRAYIENSLSGFELPLESTGKENSLEEYYLYHNIRNKTEEI |
| | | QNLSSKVRTNLRKQVVAQLTKNEIFKRIDKKELIQSDLIDFVKNEPDAN |
| | | EKIALISEFRNFTVYFKGFHENRRNMYSDEEKSTSIAFRLIHENLPKFI |
| | | DNMEVFAKIQNTSISENFDAIQKELCPELVTLCEMEKLGYENKTLSQKQ |
| | | IDAYNTVIGGKTTSEGKKIKGLNEYINLYNQQHKQEKLPKMKLLFKQIL |
| | | SDRESASWLPEKFENDSQVVGAIVNEWNTIHDTVLAEGGLKTIIASLGS |
| | | YGLEGIFLKNDLQLTDISQKATGSWGKISSEIKQKIEVMNPQKKKESYE |
| | | TYQERIDKIFKSYKSFSLAFINECLRGEYKIEDYFLKLGAVNSSSLQKE |
| | | NHFSHILNTYTDVKEVIGFYSESTDTKLIRDNGSIQKIKLFLDAVKDLQ |
| | | AYVKPLLGNGDETGKDERFYGDLIEYWSLLDLITPLYNMVRNYVTQKPY |
| | | SVDKIKINFQNPTLLNGWDLNKETDNTSVILRRDGKYYLAIMNNKSRKV |
| | | FLKYPSGTDRNCYEKMEYKLLPGANKMLPKVFFSKSRINEFMPNERLLS |
| | | NYEKGTHKKSGTCFSLDDCHTLIDFFKKSLDKHEDWKNFGFKESDTSTY |
| | | EDMSGFYKEVENQGYKLSFKPIDATYVDQLVDEGKIFLFQIYNKDESEH |
| | | SKGTPNMHTLYWKMLFDETNLGDVVYKLNGEAEVFFRKASINVSHPTHP |
| | | ANIPIKKKNLKHKDEERILKYDLIKDKRYTVDQFQFHVPITMNEKADGN |
| | | GNINQKAIDYLRSASDTHIIGIDRGERNLLYLVVIDGNGKICEQFSLNE |
| | | IEVEYNGEKYSTNYHDLLNVKENERKQARQSWQSIANIKDLKEGYLSQV |
| | | IHKISELMVKYNAIVVLEDLNAGEMRGRQKVEKQVYQKFEKKLIEKLNY |
| | | LVFKKQSSDLPGGLMHAYQLANKFESENTLGKQSGELFYIPAWNTSKMD |
| | | PVTGFVNLEDVKYESVDKAKSFFSKEDSIRYNVERDMFEWKENYGEFTK |
| | | KAEGTKTDWTVCSYGNRIITFRNPDKNSQWDNKEINLTENIKLLFERFG |
| | | IDLSSNLKDEIMQRTEKEFFIELISLEKLVLQMRNSWTGTDIDYLVSPV |
| | | CNENGEFFDSRNVDETLPQNADANGAYNIARKGMILLDKIKKSNGEKKL |
| | | ALSITNREWLSFAQGCCKNG |
| ART20 | 20 | METFSGFTNLYPLSKTLRFRLIPVGETLKHFIDSGILEEDQHRAESYVK |
| | | VKAIIDDYHRAYIENSLSGFELPLESTGKENSLEEYYLYHNIRNKTEEI |
| | | QNLSSKVRTNLRKQVVVQLTKNEIFKRIDKKELIQSDLIDEVKNEPDAN |
| | | EKIALISEFRNFTVYFKGFHENRRNMYSDEEKSTSIAFRLIHENLPKFI |
| | | DNMEVFAKIQNTSISENFDAIQKELCPELVTLCEMEKLGYENKTLSQKQ |
| | | IDAYNTVIGGKTTSEGKKIKGLNEYINLYNQQHKQEKLPKMKLLFKQIL |
| | | SDRESASWLPEKFENDSQVVGAMVNEWNTIHDTVLAEGGLKTIIASLGS |
| | | YGLEGIFLKNDLQLTDISQKATGSWSKISSEIKQKIEVMNPQKKKESYE |
| | | SYQERIDKLFKSYKSFSLAFINECLRGEYKIEDYFLKLGAVNSSSLQKE |
| | | NHFSHILNAYTDVKEAIGFYSESTDTKLIQDNDSIQKIKQFLDAVKDLQ |
| | | AYVKPLLGNGDETGKDERFYGDLIEYWSLLDLITPLYNMVRNYVTQKPY |
| | | SVDKIKINFQNPTLLNGWDLNKETDNTSVILRRDGKYYLAIMNNKSRKV |
| | | FLKYPSGTDGNCYEKMEYKLLPGANKMLPKVFFSKSRINEFMPNERLLS |
| | | NYEKGTHKKSGICFSLDDCHTLIDFFKKSLDKHEDWKNFGFKESDTSTY |
| | | EDMSGFYKEVENQGYKLSFKPIDATYVDQLVDEGKIFLFQIYNKDESEH |
| | | SKGTPNMHTLYWKMLFDETNLGDVVYKLNGEAEVFFRKASINVSHPTHP |
| | | ANIPIKKKNLKHKDEERILKYDLIKDKRYTVDQFQFHVPITMNEKADGN |
| | | GNINQKAIDYLCSASDTHIIGIDRGERNLLYLVVIDGNGKICEQFSLNE |
| | | IEVEYNGEKYSTNYHDLLNVKENERKQARQSWQSIANIKDLKEGYLSQV |
| | | IHKISELMVKYNAIVVLEDLNAGEMRGRQKVEKQVYQKFEKKLIEKLNY |
| | | LVFKKQSSDLPGGLMHAYQLANKFESENALGKQSGELFYIPAWNTSKMD |
| | | PVTGFVNLEDVKYESVDKAKSFFSKEDSMRYNVERDMFEWKENYGEFTK |
| | | KAEGTKTDWTVCSYGNRIITFRNPDKNSQWDNKEINLTENIKLLFERFG |
| | | IDLSSNLKDEIMQRTEKEFFIELISLFKLVLQMRNSWTGTDIDYLVSPV |
| | | CNENGEFFDSRNVDETLPQNADANGAYNIARKGMILLDKIKKSNGEKKL |
| | | ALSITNREWLSFAQGCCKNG |
| ART21 | 21 | METFSGFTNLYPLSKTLRERLIPVGETLKHFIGSGILEEDQHRAESYVK |
| | | VKAIIDDYHRTYIENSLSGFELPLESTGKENSLEEYYLYHNIRNKTEEI |
| | | QNLSSKVRTNLRKQVVTQLTKNEIFKRIDKKELIQSDLIDFVKNEPDAN |
| | | EKIALISEFRNFTVYFKGEHENRRNMYSDEEKSTSIAFRLIHENLPKFI |
| | | DNMEVFAKIQNTSISENFDAIQKELCPELVTLCEMEKLGYENKTLSQKQ |
| | | IDAYNTVIGGKTTSEGKKIKGLNEYINLYNQQHKQEKLPKMKLLFKQIL |
| | | SDRESASWLLEKFENDSQVVGAMVNEWNTIHDTVLAEGGLKTIIASLGS |
| | | YGLEGIFLKNDLQLTDISQKATGSWSKISSEIKQKIEAMNPQKKKESYE |
| | | SYQERIDKLFKSYKSFSLAFVNECLRGEYKIEDYFLKLGAVNSSLLQKE |
| | | NHESHILNTYTDVKEVIGFYSESTDTKLIQDNDSIQKIKQFLDAVKDLQ |
| | | AYVKPLLGNSDETGKDERFYGDLIEYWSLLDLITPLYNMVRNYVTQKPY |
| | | SVDKIKINFQNPTLLNGWDLNKEMDNTSVILRRDGKYYLAIMNNKSRKV |
| | | FLKYPSGTDRNCYEKMEYKLLPGANKMLPKVFFSKSRINEEMPNERLLS |
| | | NYEKGTHKKSGTCFSLDDCHTLIDFFKKSLNKHEDWKNFGFKESDTSTY |
| | | EDMSGFYKEVENQGYKLSFKPIDATYVDQLVDEGKIFLFQIYNKDFSEH |
| | | SKGTPNMHTLYWKMLFDETNLGDVVYKLNGEAEVFFRKASINVSHPTHP |
| | | ANIPIKKKNLKHKDEERILKYDLIKDKRYTVDQFQFHVPITMNEKANGN |
| | | GNINQKAIDYLRSASDTHIIGIDRGERNLLYLVVIDGNGKICEQFSLNE |
| | | IEVEYNGEKYSTNYHDLLNVKENERKQARQSWQSIANIKDLKEGYLSQV |
| | | IHKISELMVKYNAIVVLEDLNAGEMRGRQKVEKQVYQKFEKKLIEKLNY |
| | | LVFKKQSSDLPGGLMHAYQLANKFESENTLGKQSGELFYIPAWNTSKMD |
| | | PVTGFVNLEDVKYESVDKAKSFFSKEDSIRYNVERDMFEWKENYDEFTK |
| | | KAEGTKTDWTVCSYGNRIITFRNPDKNSQWDNKEINLTENIKLLFERFG |
| | | IDLSSNLKDEIMERTEKEFFIELISLFKLVLQMRNSWTGTDIDYLVSPV |
| | | CNENGEFFDSRNVDETLPQNADANGAYNIARKGMILLDKIKKNNGEKKL |
| | | TLSITNREWLSFAQGCCKNG |
| ART22 | 22 | MLFQDFTHLYPLSKTVRFELKPIGKTLEHIHAKNELSQDKTMADMYQKV |
| | | KAILDDYHRDFIADMMGEVKLTKLAEFCDVYLKERKNPKDDGLQKQLKD |
| | | LQAVLRKEIVKPIGNGGKYKVGYDRLFGAKLFKDGKELGDLAKEVIAQE |
| | | SESSPKLPQIAHFEKESTYFTGFHDNRKNMYSSDDKHTAIAYRLIHENL |
| | | PRFIDNLQILATIKQKHSALYDQIASELTASGLDVSLASHLGGYHKLLT |
| | | QEGITAYNRIIGEVNSYTNKHNQICHKSERIAKLRPLHKQILSDGMGVS |
| | | FLPSKFADDSEMCQAVNEFYRHYADVFAKVQSLEDREDDYQKDGIYVEH |
| | | KNLNELSKRAFGDFGELKRFLEEYYADVIDPEFNEKFAKTEPDSDEQKK |
| | | LAGEKDKFVKGVHSLASLEQVIEYYTAGYDDESVQADKLGQYFKHRLAG |
| | | VDNPIQKIHNSHSTIKGFLERERPAGERALPKIKSDKSPEMTQLRQLKE |
| | | LLDNALNVVHFAKLVSTETVLDTRSDKFYGEFRPLYVELAKITTLYNKV |
| | | RDYLSQKPFSTEKYKLNFGNPTLLNGWDLNKEKDNFGVILQKDGCYYLA |
| | | LLDKAHKKVFDNAPNTGKSVYQKMVYKQIANARRDLACLLIINGKVVRK |
| | | TKGLDDLREKYLPYDIYKIYQSESYKVLSPNFNHQDLVKYIDYNKILAS |
| | | GYFEYFDFRFKESSEYKSYKEFLDDVDNCGYKISFCNINADYIDELVEQ |
| | | GQLYLFQIYNKDFSPKAHGKPNLHTLYFKALFSEDNLANPIYKLNGEAQ |
| | | IFYRKASLDMNETTIHRAGEVLENKNPDNPKQRQFVYDIIKDKRYTQDK |
| | | FMLHVPITMNFGVQGMTIEGENKKVNQSIQQYDDVNVIGIDRGERHLLY |
| | | LTVINSKGEILEQRSLNDIITTSANGTQMTTPYHKILNKKKEGRLQARK |
| | | DWGEIETIKELKAGYLSHVVHQISQLMLKYNAIVVLEDLNFGFKRGRLK |
| | | VENQVYQNFENALIKKLNHLVLKDKTDDEIGSYKNALQLTNNFTDLKSI |
| | | GKQTGFLFYVPARNTSKIDPETGFVDLLKPRYENITQSQAFFGKEDKIC |
| | | YNTDKGYFEFHIDYAKFTDEAKNSRQTWVICSHGDKRYVYNKTANQNKG |
| | | ATKGINVNDELKSLFACHHINDKQPNLVMDICQNNDKEFHKSLMYLLKA |
| | | LLALRYSNANSDEDFILSPVANDEGVFENSALADDTQPQNADANGAYHI |
| | | ALKGLWVLEQIKNSDDLDKVDLEIKDDEWRNFAQNR |
| ART23 | 23 | MGKNQNFQEFIGVSPLQKTLRNELIPTETTKKNITQLDLLTEDEIRAQN |
| | | REKLKEMMDDYYRDVIDSTLHAGIAVDWSYLFSCMRNHLRENSKESKRE |
| | | LERTQDSIRSQIYNKFAERADFKDMFGASIITKLLPTYIKQNPEYSERY |
| | | DESMEILKLYGKFTTSLTDYFETRKNIFSKEKISSAVGYRIVEENAEIF |
| | | LQNQNAYDRICKIAGLDLHGLDNEITAYVDGKTLKEVCSDEGEAKAITQ |
| | | EGIDRYNEAIGAVNQYMNLLCQKNKALKPGQFKMKRLHKQILCKGTTSF |
| | | DIPKKFENDKQVYDAVNSFTEIVMKNNDLKRLLNITQNVNDYDMNKIYV |
| | | AADAYSTISQFISKKWNLIEECLLDYYSDNLPGKGNAKENKVKKAVKEE |
| | | TYRSVSQLNELIEKYYVEKTGQSVWKVESYISRLAETITLELCHEIEND |
| | | EKHNLIEDDDKISKIKELLDMYMDAFHIIKVERVNEVLNEDETFYSEMD |
| | | EIYQDMQEIVPLYNHVRNYVTQKPYKQEKYRLYENTPTLANGWSKNKEY |
| | | DNNAIILMRDDKYYLGILNAKKKPSKQTMAGKEDCLEHAYAKMNYYLLP |
| | | GANKMLPKVELSKKGIQDYHPSSYIVEGYNEKKHIKGSKNEDIRFCRDL |
| | | IDYFKECIKKHPDWNKENFEFSATETYEDISVFYREVEKQGYRVEWTYI |
| | | NSEDIQKLEEDGQLFLFQIYNKDFAVGSTGKPNLHTLYLKNLESEENLR |
| | | DIVLKLNGEAEIFFRKSSVQKPVIHKCGSILVNRTYEITESGTTRVQSI |
| | | PESEYMELYRYENSEKQIELSDEAKKYLDKVQCNKAKTDIVKDYRYTMD |
| | | KFFIHLPITINFKVDKGNNVNAIAQQYIAEQEDLHVIGIDRGERNLIYV |
| | | SVIDMYGRILEQKSENLVEQVSSQGTKRYYDYKEKLQNREEERDKARKS |
| | | WKTIGKIKELKEGYLSSVIHEIAQMVVKYNAIIAMEDLNYGEKRGREKV |
| | | ERQVYQKFETMLISKLNYLADKSQAVDEPGGILRGYQMTYVPDNIKNVG |
| | | RQCGIIFYVPAAYTSKIDPTTGFINAFKRDVVSTNDAKENELMKEDSIQ |
| | | YDIEKGLFKFSFDYKNFATHKLTLAKTKWDVYINGTRIQNMKVEGHWLS |
| | | MEVELTTKMKELLDDSHIPYEEGQNILDDLREMKDITTIVNGILEIFWL |
| | | TVQLRNSRIDNPDYDRIISPVLNNDGEFFDSDEYNSYIDAQKAPLPIDA |
| | | DANGAFCIALKGMYTANQIKENWVEGEKLPADCLKIEHASWLAFMQGER |
| | | G |
| ART24 | 24 | MNTSLFSSFTRQYPVTKTLRFELKPMGATLGHIQQKGFLHKDEELAKIY |
| | | KKIKELLDEYHRAFIADTLGDAQLVGLDDFYADYQALKQDSKNSHLKDK |
| | | LTKTQDNLRKQITKNFEKTPQLKERYKRLFTKELFKAGKDKGDLEKWLI |
| | | NHDSEPNKAEKISWIHQFENFTTYFQGFYENRKNMYSDEVKHTAIAYRL |
| | | IHENLPRFVDNIQVLSKIKSDYPDLYHELNHLDSRTIDFADEKEDDMLQ |
| | | MDFYHHLLIQSGITAYNTLLGGKVLEGGKKLQGINELINLYGQKHKIKI |
| | | AKLKPLHKQILSDGQSVSFLPKKFDNDYELCQTVNHFYREYVAIFDELV |
| | | VLFQKFYDYDKDNIYINHQQLNQLSHELFADERLLSRALDFYYCQIIDG |
| | | DENNKINNAKSQNAKEKLLKEKERYTKSNHSINELQKAINHYASHHEDT |
| | | EVKVISDYFSATNIRNMIDGIHHHESTIKGFLEKDNNQGESYLPKQKNS |
| | | NDVKNLKLFLDGVLRLIHFIKPLALKSDDTLEKEEHFYGEFMPLYDKLV |
| | | MFTLLYNKVRDYISQKPYNDEKIKLNFGNSTLLNGWDVNKEKDNFGVIL |
| | | CKEGLYYLAILDKSHKKVEDNAPKATSSHTYQKMVYKLLPGPNKMLPKV |
| | | FFAKSNIGYYQPSAQLLENYEKGTHKKGSNFSLTDCHHLIDFFKSSIAK |
| | | HPEWKEFGERESDTHTYQDLSDFYKEIEPQSYKVKFIDIDADYIDDLVE |
| | | KGQLYLFQLYNKDFSKQSYGKPNLHTLYFKSLFSDDNLKNPIYKLNGEA |
| | | EIFYRRASLSVSDTTIHQAGEILTPKNPNNTHNRTLSYDVIKNKRYTTD |
| | | KFFLHIPITMNFGIENTGFKAFNHQVNTTLKNADKKDVHIIGIDRGERH |
| | | LLYVSVIDGDGRIVEQRTLNDIVSISNNGMSMSTPYHQILDNREKERLA |
| | | ARTDWGDIKNIKELKAGYLSHVVHEVVQMMLKYNAMIVLEDLNFGEKHG |
| | | RFKVEKQVYQNFENALIKKLNYLVLKNADNHQLGSVRKALQLTNNFTDI |
| | | KSIGKQTGFIFYVPAWNTSKIDPTTGFVDLLKPRYENMAQAQSFISREK |
| | | KIAYNHQLDYFEFEFDYADFYQKTIDKKRIWTLCTYGDVRYYYDHKTKE |
| | | TKTVNITKELKSLLDKHDLSYQNGHNLVDELANSHDKSLLSGVMYLLKV |
| | | LLALRYSHAQKNEDFILSPVMNKDGVFFDSRFADDVLPNNADANGAYHI |
| | | ALKGLWVLNQIQSADNMDKIDLSISNEQWLHFTQSR |
| ART25 | 25 | MVGNKISNSFDSFTGINALSKTLRNELIPSDYTKRHIAESDFIAADINK |
| | | NEDQYVAKEMMDDYYRDFISKVLDNLHDIEWKNLFELMHKAKIDKSDAT |
| | | SKELIKIQDMLRKKIGKKESQDPEYKVMLSAGMITKILPKYILEKYETD |
| | | REDRLEAIKRFYGFTVYFKEFWASRQNVESDKAIASSISYRIIHENAKI |
| | | YMDNLDAYNRIKQIACEEIEKIEEEAYDFLQGDQLDVVYTEEAYGRFIS |
| | | QSGIDLYNNICGVINAHMNLYCQSKKCSRSKFKMQKLHKQILCKAETGE |
| | | EIPLGFQDDAQVINAINSENALIKEKNIISRLRTIGKSISLYDVNKIYI |
| | | SSKAFENVSVYIDHKWDVIASSLYKYFSEIVKGNKDNREEKIQKEIKKV |
| | | KSCSLGDLQRLVNSYYKIDSTCLEHEVTEFVTKIIDEIDNFQITDEKEN |
| | | DKISLIQNEQIVMDIKTYLDKYMSIYHWMKSFVIDELVDKDMEFYSELD |
| | | ELNEDMSEIVNLYNKVRNYVTQKPYSQEKIKLNFGSPTLADGWSKSKEF |
| | | DNNAIILIRDEKIYLAIFNPRNKPAKTVISGHDVCNSETDYKKMNYYLL |
| | | PGASKTLPHVFIKSRLWNESHGIPDEILRGYELGKHLKSSVNEDVEFCW |
| | | KLIDYYKECISCYPNYKAYNFKFADTESYNDISEFYREVECQGYKIDWT |
| | | YISSEDVEQLDRDGQIYLFQIYNKDFAPNSKGMDNLHTKYLKNIFSEDN |
| | | LKNIVIKLNGEAELFYRKSSVKKKVEHKKGTILVNKTYKVEDNTENSKE |
| | | KRVIIESVPDDCYMELVDYWRNGGIGILSDKAVQYKDKVSHYEATMDIV |
| | | KDRRYTVDKFFIHLPITINFKADGRININEKVLKYIAENDELHVIGIDR |
| | | GERNLLYVSVINKKGKIVEQKSENMIESYETVINIVRRYNYKDKLVNKE |
| | | SARTDARKNWKEIGKIKEIKEGYLSQVIHEISKMVLKYNAIIVMEDLNY |
| | | GFKRGRFRVERQVYQKFENMLISKLAYLVDKSRKADEPGGVLRGYQLTY |
| | | IPDSLEKLGSQCGIIFYVPAAYTSKIDPLTGFVNVENFREYSNFETKLD |
| | | FVRSLDSIRYDTEKKLESISFDYDNFKTHNTTLAKTKWVIYLRGERIKK |
| | | EHTSYGWKDDVWNVESRIKDLEDSSHMKYDDGHNLIEDILELESSVQKK |
| | | LINELIEIIRLTVQLRNSKSERYDRTEAEYDRIVSPVMDENGREYDSEN |
| | | YIFNEETELPKDADANGAYCIALKGLYNVIAIKNNWKEGEKENRKLLSL |
| | | NNYNWEDFIQNRRF |
| ART26 | 26 | MVGNKISNSFDSFTGINALSKTLRNELIPSDYTKRHIAESDFIAADTNK |
| | | NEDQYVAKEMMDDYYRDFISKVLDNLHDIEWKNLFELMHKAKIDKSDAT |
| | | SKELIKIQDMLRKKIGKKESQDPEYKVMLSAGMITKILPKYILEKYETD |
| | | REDRLEAIKRFYGFTVYFKEFWASRQNVESDKAIASSISYRIIHENAKI |
| | | YMDNLDAYNRIKQIACEEIEKIEEEAYDFLQGDQLDVVYTEEAYGRFIS |
| | | QSGIDLYNNICGVINAHMNLYCQSKKCSRSKFKMQKLHKQILCKAETGF |
| | | EIPLGFQDDAQVINAINSENALIKEKNIISRLRTIGKSISLYDVNKIYI |
| | | SSKAFENVSVYIDHKWDVIASSLYKYFSEIVKGNKDNREEKIQKEIKKV |
| | | KSCSLGDLQRLVNSYYKIDSTCLEHEVTEFVTKIIDEIDNFQITDEKEN |
| | | DKISLIQNEQIVMDIKTYLDKYMSIYHWMKSFVIDELVDKDMEFYSELD |
| | | ELNEDMSEIVNLYNKVRNYVTQKPYSQEKIKLNFGSPTLADGWSKSKEF |
| | | DNNAIILIRDEKIYLAIFNPRNKPAKTVISGHDVCNSETDYKKMNYYLL |
| | | PGASKTLPHVFIKSRLWNESHGIPDEILRGYELGKHLKSSVNEDVEFCW |
| | | KLIDYYKECISCYPNYKAYNEKFADTESYNDISEFYREVECQGYKIDWT |
| | | YISSEDVEQLDRDGQIYLFQIYNKDFAPNSKGMDNLHTKYLKNIFSEDN |
| | | LKNIVIKLNGEAELFYRKSSVKKKVEHKKGTILVNKTYKVEDNTENSKE |
| | | KRVIIESVPDDCYMELVDYWRNGGIGILSDKAVQYKDKVSHYEATMDIV |
| | | KDRRYTVDKFFIHLPITINFKADGRININEKVLKYIAENDELHVIGIDR |
| | | GERNLLYVSVINKKGKIVEQKSENMIESYETVTNIVRRYNYKDKLVNKE |
| | | SARTDARKNWKEIGKIKEIKEGYLSQVIHEISKMVLKYNAIIVMEDLNY |
| | | GFKRGRFRVERQVYQKFENMLISKLAYLVDKSRKADEPGGVLRGYQLTY |
| | | IPDSLEKLGSQCGIIFYVPAAYTSKIDPLTGFVNVENFREYSNFETKLD |
| | | FVRSLDSIRYDTEKKLESISFDYDNFKTHNTTLAKTKWVIYLRGERIKK |
| | | EHTSYGWKDDVWNVESRIKDLFDSSHMKYDDGHNLIEDILELESSVQKK |
| | | LINELIEIIRLTVQLRNSKSERYDRTEAEYDRIVSPVMDENGRFYDSEN |
| | | YIFNEETELPKDADANGAYCIALKGLYNVIAIKNNWKEGEKENRKLLSL |
| | | NNYNWFDFIQNRRFQIYLFQIYNKDFAPNSKGMDNLHTKYLKNIFSEDN |
| | | LKNIVIKLNGEAELFYRKSSVKKKVEHKKGTILVNKTYKVEDNTENSKE |
| | | KRVIIESVPDDCYMELVDYWRNGGIGILSDKAVQYKDKVSHYEATMDIV |
| | | KDRRYTVDKFFIHLPITINFKADGRININEKVLKYIAENDELHVIGIDR |
| | | GERNLLYVSVINKKGKIVEQKSENMIESYETVINIVRRYNYKDKLVNKE |
| | | SARTDARKNWKEIGKIKEIKEGYLSQVIHEISKMVLKYNAIIVMEDLNY |
| | | GFKRGRFRVERQVYQKFENMLISKLAYLVDKSRKADEPGGVLRGYQLTY |
| | | IPDSLEKLGSQCGIIFYVPAAYTSKIDPLTGFVNVENFREYSNFETKLD |
| | | FVRSLDSIRYDTEKRLFSISEDYDNEKTHNTTLAKTKWVIYLRGERIKK |
| | | EHTSYGWKDDVWNVESRIKDLFDSSHMKYDDGHNLIEDILELESSVQKK |
| | | LINELIEIIRLTVQLRNSKSERYDRTEAEYDRIVSPVMDEKGRFYDSEN |
| | | YIFNEETELPKDADANGAYCIALKGLYNVIAIKNNWKEGEKENRKLLSL |
| | | NNYNWEDFIQNRRE |
| ART27 | 27 | MQEHKKISHLTHRNSVQKTIRMQLNPVGKTMDYFQAKQILENDEKLKED |
| | | YQKIKEIADRFYRNLNEDVLSKTGLDKLKDYAEIYYHCNTDADRKRLDE |
| | | CASELRKEIVKNFKNRDEYNKLENKKMIEIVLPQHLKNEDEKEVVASFK |
| | | NFTTYFTGFFTNRKNMYSDGEESTAIAYRCINENLPKHLDNVKAFEKAI |
| | | SKLSKNAVDDLDTTYSGLCGTNLYDVFTVDYENELLPQSGITEYNKIIG |
| | | GYTTSDGTKVKGINEYINLYNQQVSKRYKIPNLKILYKQILSESEKVSF |
| | | IPPKFEDDNELLSAVSEFYANDETFDGMPLKKAIDETKLLFGNLDNSSL |
| | | NGIYIQNDRSVTNLSNSMFGSWSVIEDLWNKNYDSVNSNSRIKDIQKRE |
| | | DKRKKAYKAEKKLSLSFLQVLISNSENDEIREKSIVDYYKTSLMQLTDN |
| | | LSDKYKEAAPLENESYANEKGLKNDDKSISLIKNFLDAIKEIEKFIKPL |
| | | SETNITGEKNDLFYSQFTPLLDNISRIDILYDKVRNYVTQKPFSTDKIK |
| | | LNFGNSQLLNGWDRNKEKDCGAVWLCKDEKYYLAIIDKSNNSILENIDE |
| | | QDCDESDCYEKIIYKLLPGPNKMLPKVFFSEKCKKLLSPSDEILKIRKN |
| | | GTFKKGDKESLDDCHKLIDFYKESFKKYPNWLIYNFKFKKTNEYNDISE |
| | | FYNDVASQGYNISKMKIPTSFIDKLVDEGKIYLFQLYNKDESPHSKGTP |
| | | NLHTLYFKMLFDERNLEDVVYKLNGEAEMFYRPASIKYDKPTHPKNTPI |
| | | KNKNTLNDKRASTFPYDLIKDKRYTKWQFSLHEPITMNFKAPDRAMIND |
| | | DVRNLLKSCNNNFIIGIDRGERNLLYVSIIDSNGAIIYQHSLNIIGNKE |
| | | KGKTYETNYREKLETREKERTEQRRNWKAIESIKELKEGYISQAVHVIC |
| | | QLVVKYDAIIVMEKLTDGFKRGRTKFEKQVYQKFEKMLIDKLNYYVDKK |
| | | LDPDEEGGLLHAYQLTNKLESFDKLGMQSGFIFYVRPDFTSKIDPVTGF |
| | | VNLLYPRYENIDKAKDMISREDDIRYNAGEDFFEFDIDYDKFPKTASDY |
| | | RKKWTICTNGERIEAFRNPASNNEWSYRTIILAEKFKELEDNNSINYRD |
| | | SDNLKAEILSQTKGKFFEDFFKLLRLTLQMRNSNPETGEDRILSPVKDK |
| | | NGNFYDSSKYDEKSNLPCDADANGAYNIARKGLWIVEQFKKSDNVSTVE |
| | | PVIHNDKWLKFVQENDMANN |
| ART28 | 28 | MKNLANFTNLYSLQKTLRFELKPIGKTLDWIIKKDLLKQDEILAEDYKI |
| | | VKKIIDRYHKDFIDLAFESAYLQKKSSDSFTAIMEASIQSYSELYFIKE |
| | | KSDRDKKAMEEISGIMRKEIVECFTGKYSEVVKKKFGNLFKKELIKEDL |
| | | LNFCEPDELPIIQKFADETTYFTGEHENRENMYSNEEKATAIANRLIRE |
| | | NLPRYLDNLRIIRSIQGRYKDEGWKDLESNLKRIDKNLQYSDELTENGE |
| | | VYTFSQKGIDRYNLILGGQSVESGEKIQGLNELINLYRQKNQLDRRQLP |
| | | NLKELYKQILSDRTRHSFVPEKESSDKALLRSLLDFHKEVIQNKNLFEE |
| | | KQVSLLQAIRETLTDLKSEDLDRIYLINDTSLTQISNFVFGDWSKVKTI |
| | | LAIYFDENIANPKDRQRQSNSYLKAKENWLKKNYYSIHELNEAISVYGK |
| | | HSDEELPNTKIEDYFSGLQTKDETKKPIDVLDAIVSKYADLESLLTKEY |
| | | PEDKNLKSDKGSIEKIKNYLDSIKLLQNFLKPLKPKKVQDEKDLGFYND |
| | | LELYLESLESANSLYNKVRNYLTGKEYSDEKIKLNFKNSTLLDGWDENK |
| | | ETSNLSVIFRDINNYYLGILDKQNNRIFESIPEIQSGEETIQKMVYKLL |
| | | PGANNMLPKVFFSEKGLLKENPSDEITSLYSEGRFKKGDKFSINSLHTL |
| | | IDFYKKSLAVHEDWSVENFKFDETSHYEDISQFYRQVESQGYKITEKPI |
| | | SKKYIDTLVEDGKLYLFQIYNKDESQNKKGGGKPNLHTIYFKSLFEKEN |
| | | LKDVIVKLNGQAEVFFRKKSIHYDENITRYGHHSELLKGRFSYPILKDK |
| | | RFTEDKFQFHFPITLNFKSGEIKQFNARVNSYLKHNKDVKIIGIDRGER |
| | | HLLYLSLIDQDGKILRQESLNLIKNDQNFKAINYQEKLHKKEIERDQAR |
| | | KSWGSIENIKELKEGYLSQVVHTISKLMVEHNAIVVLEDLNFGEKRGRQ |
| | | KVERQVYQKFEKMLIEKLNFLVEKDKEMDEPGGILKAYQLTDNFVSFEK |
| | | MGKQTGFVFYVPAWNTSKIDPKTGFVNELHLNYENVNQAKELIGKEDQI |
| | | RYNQDRDWFEFQVTTDQFFTKENAPDTRTWIICSTPTKRFYSKRTVNGS |
| | | VSTIEIDVNQKLKELFNDCNYQDGEDLVDRILEKDSKDFFSKLIAYLRI |
| | | LTSLRQNNGEQGFEERDFILSPVVGSDGKFFNSLDASSQEPKDADANGA |
| | | YHIALKGLMNLHVINETDDESLGKPSWKISNKDWLNFVWQRPSLKA |
| ART29 | 29 | MQEHKKISHLTHRNSVQKTIRMQLNPVGKTMDYFQAKQILENDEKLKEN |
| | | YQKIKEIADRFYRNLNEDVLSKTRLDKLKDYTDIYYHCNTDADRKRLDE |
| | | CASELRKEIVKNEKNRDEYNKLENKKMIEIVLPKHLKNEDEKEVVTSEK |
| | | NFTTYFTGFFTNRKNMYSDGEESTAIAYRCINENLPKHLDNVKAFEKAI |
| | | SKLSKNAIDDLDTTYSGLCGTNLYDVFTVDYENELLPQSGITEYNKIIG |
| | | GYTTNDGTKVKGINEYINLYNQQVSKRDKIPNLKILYKQILSESEKVSF |
| | | IPPKFEDDNELLSAVSEFYANDETFDGMPLKKAIDETKLLEGNLDNPSL |
| | | NGIYIQNDRSVINLSNSMFGSWSVIEDLWNKNYDSVNSNSRIKDIQKRE |
| | | DKRKKAYKAEKKLSLSFLQVLISNSENDEIREKSIVDYYKTSLMQLTDN |
| | | LSDKYNEAAPLLNENYSNEKGLKNDDKSISLIKNFLDAIKEIEKFIKPL |
| | | SETNITGEKNDLFYSQFTPLLDNISRIDILYDKVRNYVTQKPFSTDKIK |
| | | LNFGNSQLLNGWDRNKEKDCGAVWLCKDEKYYLAIIDKSNNSILENIDE |
| | | QDCDESDCYEKIIYKLLPGPNKMLPKVFFSEKCKKLLSPSDEILKIYKS |
| | | GTFKTGDKFSLDDCHKLIDFYKESFKKYPNWLIYNEKFKKTNEYNDIRE |
| | | FYNDVALQGYNISKMKIPTSFIDKLVDEGKIYLFQLYNKDESPHSKGTP |
| | | NLHTLYFKMLFDERNLEDVVYRLNGEAEMFYRPASIKYDKPTHPKNTPI |
| | | KNKNTLNDKKTSTFPYDLIKDKRYTKWQFSLHFPITMNFKAPDKAMIND |
| | | DVRNLLKSCNNNFIIGIDRGERNLLYVSVIDSNGAIIYQHSLNIIGNKE |
| | | KEKTYETNYREKLATREKERTEQRRNWKAIESIKELKEGYISQAVHVIC |
| | | QLVVKYDAIIVMEKLTDGFKRGRTKFEKQVYQKFEKMLIDKLNYYVDKK |
| | | LDPDEEGGLLHAYQLTNKLESFDKLGMQSGFIFYVRPDFTSKIDPVTGF |
| | | VNLLYPQYENIDKAKDMISREDEIRYNAGEDFFEFDIDYDEFPKTASDY |
| | | RKKWTICTNGERIEAFRNPANNNEWSYRTIILAEKFKELFDNNSINYRD |
| | | SDDLKAEILSQTKGKFFEDFFKLLRLTLQMRNSNPETGEDRILSPVKDK |
| | | NGNFYDSSKYDEKSKLPCDADANGAYNIARKGLWIVEQFKKADNVSTVE |
| | | PVIHNDQWLKFVQENDMANN |
| ART30 | 30 | MQEHKKISHLTHRNSVQKTIRMQLNPVGKTMDYFQAKQILENDEKLKED |
| | | YQKIKEIADRFYRNLNEDVLSKTGLDKLKDYADIYYHCNTDADRKRLNE |
| | | CASELRKEIVKNEKNRDEYNKLENKKMIEIVLPKHLKNEDEKEVVASEK |
| | | NFTTYFTGFFTNRKNMYSDGEESTAIAYRCINENLPKHLDNVKVFEKAI |
| | | SKLSKNAIDDLGATYSGLCGTNLYDVFTVDYENELLPQSGITEYNKIIG |
| | | GYTTSDGTKVKGINEYINLYNQQVSKRDKIPNLKILYKQILSESEKVSF |
| | | IPPKFEDDNELLSAVSEFYANDETFDGMPLKKAIDETKLLEGNLDNSSL |
| | | NGIYIQNDRSVINLSNSMFGSWSVIEDLWNKNYDSVNSNSRIKDIQKRE |
| | | DKRKKAYKAEKKLSLSFLQVLISNSENDEIREKSIVDYYKTSLMQLTDN |
| | | LSDKYKEAAPLESENYDNEKGLKNDDKSISLIKNFLDAIKEIEKFIKPL |
| | | SETNITGEKNDLFYSQFTPLLDNISRIDILYDKVRNYVTQKPFSTDKIK |
| | | LNFGNSQLLNGWDKDKEREYGAVLLCKDEKYYLAIIDKSNNSILENIDE |
| | | QDCNESDYYEKIVYKLLTKINGNLPRVFFSEKRKKLLSPSDEILKIYKS |
| | | GTFKKGDKFSLDDCHKLIDFYKESFKKYPNWLIYNFKEKNTNEYNDISE |
| | | FYNDVASQGYNISKMKIPTTFIDKLVDEGKIYLFQLYNKDESPHSKGTP |
| | | NLHTLYFKMLFDERNLEDVVYKLNGEAEMFYRPASIKYDKPTHPKNTPI |
| | | KNKNTLNDKKASTFPYDLIKDKRYTKWQFSLHEPITMNFKAPDKAMIND |
| | | DVRNLLKSCNNNFIIGIDRGERNLLYVSVIDSNGAIIYQHSLNIIGNKE |
| | | KGKTYETNYREKLATREKDRTEQRRNWKAIESIKELKEGYISQAVHVIC |
| | | QLVVKYDAIIVMEKLTDGFKRGRTKFEKQVYQKFEKMLIDKLNYYVDKK |
| | | LDPDEEGGLLHAYQLTNKLESFDKLGTQSGFIFYVRPDETSKIDPVTGF |
| | | VNLLYPRYENIDKAKDMISREDDIRYNAGEDFFEFDIDYDKFPKTASDY |
| | | RKKWTICINGERIEAFRNPANNNEWSYRTIILAEKFKELEDNNSINYRD |
| | | SDDLKAEILSQTKGKFFEDFFKLLRLTLQMRNSNPETGEDRILSPVKDK |
| | | NGNFYDSSKYDEKSKLPCDADANGAYNIARKGLWIVEQFKKADNVSTVE |
| | | PVIHNDKWLKFVQENDMANN |
| ART31 | 31 | MQERKKISHLTHRNSVKKTIRMQLNPVGKTMDYFQAKQILENDEKLKEN |
| | | YQKIKEIADRFYRNLNEDVLSKTGLDKLKDYAEIYYHCNTDADRKRLNK |
| | | CASELRKEIVKNEKNRDEYNKLEDKRMIEIVLPKHLKNEDEKEVVASEK |
| | | NETTYFTGFFTNRKNMYSDGEESTAIAYRCINENLPKHLDNVKAFEKAI |
| | | SKLSKNAIDDLDAYSGLCGTNLYDVFTVDYFNELLPQSGITEYNKIIGG |
| | | YTTNDGTKVKGINEYINLYNQQVSKRDKIPNLQILYKQILSESEKVSFI |
| | | PPKFEDDNELLSAVSEFYANDETFDGMPLKKAIDETKLLFGNLDNSSLN |
| | | GIYIQNDRSVINLSNSMFGSWSVIEDLWNKNYDSVNSNSRIKDIQKRED |
| | | KRKKAYKAEKKLSLSFLQVLISNSENDEIRKKSIVDYYKTSLMQLTDNL |
| | | SDKYNEAAPLLNENYSNEKGLKNDDKSISLIKNFLDAIKEIEKFIKPLS |
| | | ETNITGEKNDLFYSQFTPLLDNISRIDILYDKVRNYVTQKPESTDKIKL |
| | | NFGNYQLLNGWDKDKEREYGAVLLCKDEKYYLAIIDKSNNRILENIDFQ |
| | | DCDESDCYEKIIYKLLPTPNKMLPKVFFAKKHKKLLSPSDEILKIYKNG |
| | | TFKKGDKESLDDCHKLIDFYKESFKKYPKWLIYNFKFKKINGYNDIREF |
| | | YNDVALQGYNISKMKIPTSFIDKLVDEGKIYLFQLYNKDESPHSKGTPN |
| | | LHTLYFKMLEDERNLEDVVYRLNGEAEMFYRPASIKYDKPTHPKNTPIK |
| | | NKNTLNDKRASTFPYDLIKDKRYTKWQFSLHFPITMNFKDPDKAMINDD |
| | | VRNLLKSCNNNFIIGIDRGERNLLYVSVINSNGAIIYQHSLNIIGNKEK |
| | | GKTYETNYREKLATREKDRTEQRRNWKAIESIKELKEGYISQAVHVICQ |
| | | LVVKYDAIIVMEKLTDGFKRGRTKFEKQVYQKFEKMLIDKLNYYVDKKL |
| | | DPDEEGGLLHAYQLTNKLESFDKLGTQSGFIFYVRPDFTSKIDPVTGFV |
| | | NLLYPRYEKIDKAKDMISREDDIRYNAGEDFFEFDIDYDKFPKTASDYR |
| | | KKWTICINGERIEAFRNPANNNEWSYRTIILAEKFKELEDNNSINYRDS |
| | | DDLKAEILSQTKGKFFEDFFKLLRLTLQMRNSNPETGEDRILSPVKDKN |
| | | GNFYDSSKYDEKSKLPCDADANGAYNIARKGLWIVEQFKKADNVSTVEP |
| | | VIHNDKWLKFVQENDMANN |
| ART32 | 32 | KTGLDKLKDYAEIYYHCNTDADRKRLNKCASELRKEIVKNEKNRDEYNK |
| | | LFDKRMIEIVLPKHLKNEDEKEVVASFKNFTTYFTGFFTNRKNMYSDGE |
| | | ESTAIAYRCINENLPKHLDNVKAFEKAISKLSKNAIDDLDATYSGLCGT |
| | | NLYDVFTVDYENELLPQSGITEYNKIIGGYTTSDGTKVKGINEYINLYN |
| | | QQVSKRDKIPNLQILYKQILSESEKVSFIPPKFEDDNELLSAVSEFYAN |
| | | DETFDEMPLKKAIDETKLLFGNLDNSSLNGIYIQNDRSVTNLSNSMEGS |
| | | WSVIEDLWNKNYDSVNSNSRIKDIQKREDKRKKAYKAEKKLSLSFLQVL |
| | | ISNSENNEIREKSIVDYYKTSLMQLTDNLSDKYNEVAPLLNENYSNEKG |
| | | LKNDDKSISLIKNFLDAIKEIEKFIKPLSETNITGEKNDLFYSQFTPLL |
| | | DNISRIDILYDKVRNYVTQKPFSTDKIKLNFGNYQLLNGWDKDKEREYG |
| | | AVLLCRDEKYYLAIIDKSNNRILENIDFQDCDESDCYEKIIYKLLPTPN |
| | | KMLPKVFFAKKHKKLLSPSDEILKIRKNGTFKKGDKFSLDDCHKLIDFY |
| | | KESFKKYPNWLIYNFKFKKTNEYNDIREFYNDVALQGYNISKMKIPTSF |
| | | IDKLVDEGKIYLFQLYNKDESPHSKGTPNLHTLYFKMLEDERNLEDVVY |
| | | KLNGEAKMFYRPASIKYDKPTHPKNTPIKNKNTLNDKKASTFPYDLIKD |
| | | KRYTKWQFSLHESITMNFKAPDKAMINDDVRNLLKSCNNNFIIGIDRGE |
| | | RNLLYVSVIDSNGAIIYQHSLNIIGNKEKGKTYETNYREKLATREKERT |
| | | EQRRNWKAIESIKELKEGYISQAVHVICQLVVKYDAIIVMEKLTDGEKR |
| | | GRTKFEKQVYQKFEKMLIDKLNYYVDKKLDPDEEGGLLHAYQLTNKLES |
| | | FDKLGTQSGFIFYVRPDFTSKIDPVTGFVNLLYPRYENIDKAKDMISRF |
| | | DDIRYNAGEDFFEFDIDYDKFPKTASDYRKKWTICINGERIEAFRNPAN |
| | | NNEWSYRTIILAEKFKELFDNNSINYRDSDDLKAEILSQTKGKFFEDFF |
| | | KLLRLTLQMRNSNPETGEDRILSPVKDKNGNFYDSSKYDEKSKLPCDAD |
| | | ANGAYNIARKGLWIVEQFKKSDNVSTVEPVIHNDKWLKFVQENDMANN |
| ART33 | 33 | MSININKESDECRKIDFFTDLYNIQKTLRESLIPIGATADNFEFKGRLS |
| | | KEKDLLDSAKRIKEYISKYLADESDICLSQPVKLKHLDEYYELYITKDR |
| | | DEQKFKSVEEKLRKELADLLKEILKRLNKKILSDYLPEYLEDDEKALED |
| | | IANLSSFSTYFNSYYDNCKNMYTDKEQSTAIPYRCINDNLPKFIDNMKA |
| | | YEKALEELKPSDLEELRNNFKGVYDTTVDDMFTLDYFNCVLSQSGIDSY |
| | | NAIIGNDKVKGINEYINLHNQTAEQGHKVPNLKRLYKQIGSQKKTISFL |
| | | PSKFESDNELLKAVYDFYNTGDAEKNFTALKDTITEFEKIFDNLSEYNL |
| | | DGVFVRNDISLTNLSQSMENDWSVERNLWNDQYDKVNNPEKAKDIDKYN |
| | | DKRHKVYKKSESFSINQLQELIATTLEEDINSKKITDYFSCDEHRVTTE |
| | | VENKYQLVKDLLSSDYPKNKNLKTSEEDVALIKDELDSVKSLESFVKIL |
| | | TGTGKESGKDELFYGSFTKWFDQLRYIDKLYDKVRNYITEKPYSLDKIK |
| | | LSFDNPQFLGGWQHSKETDYSAQLFMKDGLYYLGVMDKETKREFKTQYN |
| | | TPENDSDTMVKIEYNQIPNPGRVIQNLMLVDGKIVKKNGRKNADGVNAV |
| | | LEELKNQYLPENINRIRKTESYKTTSNNENKDDLKAYLEYYIARTKEYY |
| | | CKYNFVFKSADEYGSFNEFVDDVNNQAYQITKVKVSEKQLLSLVEQGKL |
| | | YLFKIYNKDFSEYSKGKKNLHTMYFQMLFDDRNLENLVYKLQGGAEMFY |
| | | RPASIKKDSEFKHDANVEIIKRTCEDKVNDKDNPTDDEKAKYYSKEDYD |
| | | IVKNKRFTKDQFSLHLTLAMNCNQPDHYWLNNDVRELLKKSNKNHIIGI |
| | | DRGERNLIYVTIINSDGVIVDQINENIIENSYNGKKYKTDYQKKLNQRE |
| | | EDRQKARKTWKTIETIKELKDGYISQVVHQICKLIVQYDAIVVMENING |
| | | GFKRGRTKVEKQVYQKFETMLINKLNYYVDKGTDYKECGGLLKAYQLTN |
| | | KFETFERIGKQSGIIFYVDPYLTSKIDPVTGFANLLYPKYETIPKTHNF |
| | | ISNIDDIRYNQSEDYFEFDIDYDKFPQGSYNYRKKWTICSYGNRIKYYK |
| | | DSRNKTASVVVDITEKFKETFTNAGIDFVNDNIKEKLLLVNSKELLKSF |
| | | MDTLKLTVQLRNSEINSDVDYIISPIKDRNGNFYYSENYKKSNNEVPSQ |
| | | PQDGDANGAYNIARKGLMIINKLKKADDVTNNELLKISKKEWLEFAQKG |
| | | DLGE |
| ART34 | 34 | MKATSIWDNFTRKYSVSKTLRFELRPVGKTEENIVKKEIIDAEWISGKN |
| | | IPKGTDADRARDYKIVKKLLNQLHILFINQALSSENVKEFEKEDKKSKT |
| | | FVAWSDLLATHEDNWIQYTRDKSNSTVLKSLEKSKKDLYSKLGKLLNSK |
| | | ANAWKAEFISYHKIKSPDNIKIRLSASNVQILFGNTSDPIQLLKYQIEL |
| | | DNIKFLKDDGSEYTTKELADLLSTFEKFGTYFSGENQNRANVYDIDGEI |
| | | STSIAYRLENQNIEFFFQNIKRWEQFTSSIGHKEAKENLKLVQWDIQSK |
| | | LKELDMEIVQPRENLKFEKLLTPQSFIYLLNQEGIDAFNTVLGGIPAEV |
| | | KAEKKQGVNELINLTRQKLNEDKRKFPSLQIMYKQIMSERKINFIDQYE |
| | | DDVEMLKEIQEFSNDWNEKKKRHSASSKEIKESAIAYIQREFHETEDSL |
| | | EERATVKEDFYLSEKSIQNLSIDIFGGYNTIHNLWYTEVEGMLKSGERP |
| | | LTRVEKEKLKKQEYISFAQIERLISKHSQQYLDSTPKEANDRSLEKEKW |
| | | KKTFKNGFKVSEYTNLKLNELISEGETFQKIDQETGKETTIKIPGLFES |
| | | YENAILVESIKNQSLGTNKKESVPSIKEYLDSCLRLSKFIESFLVNSKD |
| | | LKEDQSLDGCSDFQNTLTQWLNEEFDVFILYNKVRNHVTKKPGNTDKIK |
| | | INFDNATLLDGWDVDKEAANFGFLLKKADNYYLGIADSSFNQDLKYENE |
| | | GERLDEIEKNRKNLEKEESKNISKIDQEKVKKYKEVIDDLKAISNLNKG |
| | | RYSKAFYKQSKFTTLIPKCTTQLNEVIEHFKKEDTDYRIENKKFAKPFI |
| | | ITKEVFLLNNTVYDTATKKFTLKIGEDEDTKGLKKFQIGYYRATDDKKG |
| | | YESALRNWITFCIEFTKSYKSCLNYNYSSLKSVSEYKSLDEFYKDLNGI |
| | | GYTIDFVDISEEYINKKINEGKLYLFQIYNKDESEKSKGKENLHTTYWK |
| | | LLFDSKNLEDVVIKLNGQAEVFFRPASIHEKEKITHEKNQEIQNKNPNA |
| | | VKKTSKFEYDIIKDNRFTKNKFLFHCPITLNFKADGNPYVNNEVQENIA |
| | | KNPNVNIIGIDRGEKHLLYFTVINQQGQILDAGSLNSIKSEYKDKNQQS |
| | | VSFETPYHKILDKKESERKEARESWQEIENIKELKAGYLSHVVHQLSNL |
| | | IVKYNAIVVLEDLNKGFKRGRFKVEKQVYQKFEKSLIEKLNYLVEKDRK |
| | | ESNEPGHHLNAYQLTNKELSFERLGKQSGVLFYATASYTSKVDPVTGEM |
| | | QNIYDPYHKEKTREFYKNFTKIVYNGNYFEFNYDLNSVKPDSEEKRYRT |
| | | NWTVCSCVIRSEYDSNSKTQKTYNVNDQLVKLFEDAKIKIENGNDLKST |
| | | ILEQDDKFIRDLHFYFIAIQKMRVVDSKIEKGEDSNDYIQSPVYPFYCS |
| | | KEIQPNKKGFYELPSNGDSNGAYNIARKGIVILDKIRLRVQIEKLFEDG |
| | | TKIDWQKLPNLISKVKDKKLLMTVFEEWAELTHQGEVQQGDLLGKKMSK |
| | | KGEQFAEFIKGLNVTKEDWEIYTQNEKVVQKQIKTWKLESNST |
| ART35 | 35 | MKAINEYYKQLGAYCREEGKEKDDFFKRIDGAYCAISHLFFGEHGEIAQ |
| | | SDSDVELIQKLLEAYKGLQRFIKPLLGHGDEADKDNEFDAKLRKVWDEL |
| | | DIITPLYDKVRNWLSRKIYNPEKIKLCFENNGKLLSGWVDSRTKSDNGT |
| | | QYGGYIFRKKNEIGEYDFYLGISADTKLFRRDAAISYDDGMYERLDYYQ |
| | | LKSKTLLGNSYVGDYGLDSMNLLSAFKNAAVKFQFEKEVVPKDKENVPK |
| | | YLKRLKLDYAGFYQILMNDDKVVDAYKIMKQHILATLTSSIRVPAAIEL |
| | | ATQKELGIDELIDEIMNLPSKSFGYFPIVTAAIEEANKRENKPLFLFKM |
| | | SNKDLSYAATASKGLRKGRGTENLHSMYLKALLGMTQSVEDIGSGMVFF |
| | | RHQTKGLAETTARHKANEFVANKNKLNDKKKSIFGYEIVKNKRFTVDKY |
| | | LFKLSMNLNYSQPNNNKIDVNSKVREIISNGGIKNIIGIDRGERNLLYL |
| | | SLIDLKGNIVMQKSLNILKDDHNAKETDYKGLLTEREGENKEARRNWKK |
| | | IANIKDLKRGYLSQVVHIISKMMVEYNAIVVLEDLNPGFIRGRQKIERN |
| | | VYEQFERMLIDKLNFYVDKHKGANETGGLLHALQLTSEFKNEKKSEHQN |
| | | GCLFYIPAWNTSKIDPATGFVNLENTKYTNAVEAQEFFSKEDEIRYNEE |
| | | KDWFEFEFDYDKFTQKAHGTRTKWTLCTYGMRLRSFKNSAKQYNWDSEV |
| | | VALTEEFKRILGEAGIDIHENLKDAICNLEGKSQKYLEPLMQFMKLLLQ |
| | | LRNSKAGTDEDYILSPVADENGIFYDSRSCGDQLPENADANGAYNIARK |
| | | GLMLIEQIKNAEDLNNVKEDISNKAWLNFAQQKPYKNGMKAINEYYKQL |
| | | GAYCREEGKEKDDFFKRIDGAYCAISHLFFGEHGEIAQSDSDVELIQKL |
| | | LEAYKGLQRFIKPLLGHGDEADKDNEFDAKLRKVWDELDIITPLYDKVR |
| | | NWLSRKIYNPEKIKLCFENNGKLLSGWVDSRTKSDNGTQYGGYIFRKKN |
| | | EIGEYDFYLGISADTKLERRDAAISYDDGMYERLDYYQLKSKTLLGNSY |
| | | VGDYGLDSMNLLSAFKNAAVKFQFEKEVVPKDKENVPKYLKRLKLDYAG |
| | | FYQILMNDDKVVDAYKIMKQHILATLTSSIRVPAAIELATQKELGIDEL |
| | | IDEIMNLPSKSFGYFPIVTAAIEEANKRENKPLFLFKMSNKDLSYAATA |
| | | SKGLRKGRGTENLHSMYLKALLGMTQSVEDIGSGMVFFRHQTKGLAETT |
| | | ARHKANEFVANKNKLNDKKKSIFGYEIVKNKRFTVDKYLFKLSMNLNYS |
| | | QPNNNKIDVNSKVREIISNGGIKNIIGIDRGERNLLYLSLIDLKGNIVM |
| | | QKSLNILKDDHNAKETDYKGLLTEREGENKEARRNWKKIANIKDLKRGY |
| | | LSQVVHIISKMMVEYNAIVVLEDLNPGFIRGRQKIERNVYEQFERMLID |
| | | KLNFYVDKHKGANETGGLLHALQLTSEFKNFKKSEHQNGCLFYIPAWNT |
| | | SKIDPATGFVNLENTKYTNAVEAQEFFSKEDEIRYNEEKDWFEFEFDYD |
| | | KFTQKAHGTRTKWTLCTYGMRLRSFKNSAKQYNWDSEVVALTEEFKRIL |
| | | GEAGIDIHENLKDAICNLEGKSQKYLEPLMQFMKLLLQLRNSKAGTDED |
| | | YILSPVADENGIFYDSRSCGDQLPENADANGAYNIARKGLMLIEQIKNA |
| | | EDLNNVKFDISNKAWLNFAQQKPYKNG |
| ART11 | 36 | MYYQGLTKLYPISKTIRNELIPVGKTLEHIRMNNILEADIQRKSDYERV |
| * | | KKLMDDYHKQLINESLQDVHLSYVEEAADLYLNASKDKDIVDKESKCQD |
| | | KLRKEIVNLLKSHENFPKIGNKEIIKLLQSLSDTEKDYNALDSFSKFYT |
| | | YFTSYNEVRKNLYSDEEKSSTAAYRLINENLPKELDNIKAYSIAKSAGV |
| | | RAKELTEEEQDCLEMTETFERTLTQDGIDNYNELIGKLNFAINLYNQQN |
| | | NKLKGFRKVPKMKELYKQILSEREASFVDEFVDDEALLINVESESAHIK |
| | | EFLESDSLSRFAEVLEESGGEMVYIKNDTSKTTFSNIVEGSWNVIDERL |
| | | AEEYDSANSKKKKDEKYYDKRHKELKKNKSYSVEKIVSLSTETEDVIGK |
| | | YIEKLQADIIAIKETREVFEKVVLKEHDKNKSLRKNTKAIEAIKSELDT |
| | | IKDFERDIKLISGSEHEMEKNLAVYAEQENILSSIRNVDSLYNMSRNYL |
| | | TQKPFSTEKFKLNFNRATLLNGWDKNKETDNLGILLVKEGKYYLGIMNT |
| | | KANKSFVNPPKPKTDNVYHKVNYKLLPGPNKMLPKVFFAKSNLEYYKPS |
| | | EDLLAKYQAGTHKKGENFSLEDCHSLISFFKDSLEKHPDWSEFGFKESD |
| | | TKKYDDLSGFYREVEKQGYKITYTDIDVEYIDSLVEKDELYFFQIYNKD |
| | | FSPYSKGNYNLHTLYLTMLEDERNLRNVVYKLNGEAEVFYRPASIGKDE |
| | | LIIHKSGEEIKNKNPKRAIDKPTSTFEYDIVKDRRYTKDKFMLHIPVTM |
| | | NFGVDETRRENEVVNDAIRGDDKVRVIGIDRGERNLLYVVVVDSDGTIL |
| | | EQISLNSIINNEYSIETDYHKLLDEKEGDRDRARKNWTTIENIKELKEG |
| | | YLSQVVNVIAKLVLKYDAIICLEDLNFGFKRGRQKVEKQVYQKFEKMLI |
| | | DKLNYLVIDKSRSQENPEEVGHVLNALQLTSKFTSFKELGKQTGIIYYV |
| | | PAYLTSKIDPTTGFANLFYVKYESVEKSKDFENREDSICENKVAGYFEF |
| | | SFDYKNFTDRACGMRSKWKVCTNGERIIKYRNEEKNSSEDDKVIVLTEE |
| | | FKKLFNEYGIAFNDCMDLTDAINAIDDASFFRKLTKLFQQTLQMRNSSA |
| | | DGSRDYIISPVENDNGEFENSEKCDKSKPKDADANGAFNIARKGLWVLE |
| | | QLYNSSSGEKLNLAMTNAEWLEYAQQHTI |

[0137] In certain embodiments, a Cas nuclease comprises ABW1 (SEQ ID NO: 3), ABW2 (SEQ ID NO: 16), ABW3 (SEQ ID NO: 29), ABW4 (SEQ ID NO: 42), ABW5 (SEQ ID NO: 55), ABW6 (SEQ ID NO: 68), ABW7 (SEQ ID NO: 81), ABW8 (SEQ ID NO: 94), or ABW9 (SEQ ID NO: 107) (all SEQ ID NOs for ABW 1-9 and variants thereof from International (PCT) Application Publication No. WO 2021/108324), or variants thereof, such as any one of variants 1-10 of ABW1 (SEQ ID NOs: 4-13, respectively), any one of variants 1-10 of ABW2 (SEQ ID NOs: 17-26, respectively), any one of variants 1-10 of ABW3 (SEQ ID NOs: 30-39, respectively), any one of variants 1-10 of ABW4 (SEQ ID NOs: 43-52, respectively), any one of variants 1-10 of ABW5 (SEQ ID NOs: 56-65, respectively), any one of variants 1-10 of ABW6 (SEQ ID NOs: 69-78, respectively), any one of variants 1-10 of ABW7 (SEQ ID NOs: 82-91, respectively), any one of variants 1-10 of ABW8 (SEQ ID NOs: 95-104, respectively), any one of variants 1-10 of ABW9 (SEQ ID NOs: 108-117, respectively). ABW1-ABW9, and variants thereof are known in the art and are described in International (PCT) Application Publication No. WO 2021/108324.

[0138] More type V-A Cas nucleases and their corresponding naturally occurring CRISPR-Cas systems can be identified by computational and experimental methods known in the art, e.g., as described in U.S. Pat. No. 9,790,490 and Shmakov et al. (2015) MOL. CELL, 60:385. Exemplary computational methods include analysis of putative Cas proteins by homology modeling, structural BLAST, PSI-BLAST, or HHPred, and analysis of putative CRISPR loci by identification of CRISPR arrays. Exemplary experimental methods include in vitro cleavage assays and in-cell nuclease assays (e.g., the Surveyor assay) as described in Zetsche et al. (2015) CELL, 163:759.

[0139] In certain embodiments, the Cas protein is a Cas nuclease that directs cleavage of one or both strands at the target locus, such as the target strand (i.e., the strand having the target nucleotide sequence that is at least partially complementary to and can hybridize with a single guide nucleic acid or dual guide nucleic acids) and/or the non-target strand. In certain embodiments, the Cas nuclease directs cleavage of one or both strands within about 1, 2, 3, 4, 5, 6, 7, 8, 9, 10, 15, 20, 25, 50, 100, 200, 500, or more nucleotides from the first or last nucleotide of the target nucleotide sequence or its complementary sequence. In certain embodiments, the cleavage is staggered, i.e. generating sticky ends. In certain embodiments, the cleavage generates a staggered cut with a 5′ overhang. In certain embodiments, the cleavage generates a staggered cut with a 5′ overhang of 1 to 5 nucleotides, e.g., of 4 or 5 nucleotides. In certain embodiments, the cleavage site is distant from the PAM, e.g., the cleavage occurs after the 18th nucleotide on the non-target strand and after the 23rd nucleotide on the target strand.

[0140] In certain embodiments, a composition provided herein comprises a Cas nuclease that a compatible guide nucleic acid (gNA), e.g., a gRNA, is capable of activating. In certain embodiments, a composition provided herein further comprises a Cas protein that is related to the Cas nuclease that a compatible guide nucleic acid (gNA), e.g., a gRNA, is capable of activating. For example, in certain embodiments, a Cas protein comprises an amino acid sequence at least 80% (e.g., at least 85%, at least 90%, at least 91%, at least 92%, at least 93%, at least 94%, at least 95%, at least 96%, at least 97%, at least 98%, or at least 99%) identical to the Cas nuclease amino acid sequence. In certain embodiments, a Cas protein comprises a nuclease-inactive mutant of the Cas nuclease. In certain embodiments, a Cas protein further comprises an effector domain.

[0141] In certain embodiments, a Cas protein lacks substantially all DNA cleavage activity. Such a Cas protein can be generated, e.g., by introducing one or more mutations to an active Cas nuclease (e.g., a naturally occurring Cas nuclease). A mutated Cas protein is considered to lack substantially all DNA cleavage activity when the DNA cleavage activity of the protein has no more than about 25%, 10%, 5%, 1%, 0.1%, 0.01%, or less of the DNA cleavage activity of the corresponding non-mutated form, for example, nil or negligible as compared with the non-mutated form. Thus, a Cas protein may comprise one or more mutations (e.g., a mutation in the RuvC domain of a type V-A Cas protein) and be used as a generic DNA binding protein with or without fusion to an effector domain. Exemplary mutations include D908A, E993A, and D1263A with reference to the amino acid positions in AsCpf1: D832A, E925A, and D1180A with reference to the amino acid positions in LbCpf1; and D917A, E1006A, and D1255A with reference to the amino acid position numbering of the FnCpf1. More mutations can be designed and generated according to the crystal structure described in Yamano et al. (2016) CELL, 165:949.

[0142] It is understood that a Cas protein, rather than losing nuclease activity to cleave all DNA, may lose the ability to cleave only the target strand or only the non-target strand of a double-stranded DNA, thereby being functional as a nickase (see, Gao et al. (2016) CELL RES., 26:901). Accordingly, in certain embodiments, a Cas nuclease is a Cas nickase. In certain embodiments, a Cas nuclease has the activity to cleave the non-target strand but lacks substantially the activity to cleave the target strand, e.g., by a mutation in the Nuc domain. In certain embodiments, a Cas nuclease has the cleavage activity to cleave the target strand but lacks substantially the activity to cleave the non-target strand.

[0143] In certain embodiments, a Cas nuclease has the activity to cleave a double-stranded DNA and result in a double-strand break.

[0144] Cas proteins that lack substantially all DNA cleavage activity or have the ability to cleave only one strand may also be identified from naturally occurring systems. For example, certain naturally occurring CRISPR-Cas systems may retain the ability to bind the target nucleotide sequence but lose entire or partial DNA cleavage activity in eukaryotic (e.g., mammalian or human) cells. Such type V-A proteins are disclosed, for example, in Kim et al. (2017) ACS SYNTH. BIOL. 6 (7): 1273-82 and Zhang et al. (2017) CELL DISCOV. 3:17018.

[0145] The activity of a Cas protein (e.g., Cas nuclease) can be altered, e.g., by creating an engineered Cas protein. In certain embodiments, altered activity of an engineered Cas protein comprises increased targeting efficiency and/or decreased off-target binding. While not wishing to be bound by theory, it is hypothesized that off-target binding can be recognized by the Cas protein, for example, by the presence of one or more mismatches between the spacer sequence and the target nucleotide sequence, which may affect the stability and/or conformation of the CRISPR-Cas complex. In certain embodiments, altered activity comprises modified binding, e.g., increased binding to the target locus (e.g., the target strand or the non-target strand) and/or decreased binding to off-target loci. In certain embodiments, altered activity comprises altered charge in a region of the protein that associates with a single guide nucleic acid or dual guide nucleic acids. In certain embodiments, altered activity of an engineered Cas protein comprises altered charge in a region of the protein that associates with the target strand and/or the non-target strand. In certain embodiments, altered activity of an engineered Cas protein comprises altered charge in a region of the protein that associates with an off-target locus. The altered charge can include decreased positive charge, decreased negative charge, increased positive charge, or increased negative charge. For example, decreased negative charge and increased positive charge may generally strengthen binding to the nucleic acid(s) whereas decreased positive charge and increased negative charge may weaken binding to the nucleic acid(s). In certain embodiments, altered activity comprises increased or decreased steric hindrance between the protein and a single guide nucleic acid or dual guide nucleic acids. In certain embodiments, altered activity comprises increased or decreased steric hindrance between the protein and the target strand and/or the non-target strand. In certain embodiments, altered activity comprises increased or decreased steric hindrance between the protein and an off-target locus. In certain embodiments, a modification or mutation comprises one or more substitutions of Lys, His, Arg, Glu, Asp, Ser, Gly, and/or Thr. In certain embodiments, a modification or mutation comprises one or more substitutions with Gly, Ala, Ile, Glu, and/or Asp. In certain embodiments, modification or mutation comprises one or more amino acid substitutions in the groove between the WED and RuvC domain of the Cas protein (e.g., a type V-A Cas protein).

[0146] In certain embodiments, altered activity of an engineered Cas protein comprises increased nuclease activity to cleave the target locus. In certain embodiments, altered activity of an engineered Cas protein comprises decreased nuclease activity to cleave an off-target locus. In certain embodiments, altered activity of an engineered Cas protein comprises altered helicase kinetics. In certain embodiments, an engineered Cas protein comprises a modification that alters formation of the CRISPR complex.

[0147] In certain embodiments, a protospacer adjacent motif (PAM) or PAM-like motif directs binding of a Cas protein complex to a target locus. Many Cas proteins have PAM specificity. The precise sequence and length requirements for the PAM differ depending on the Cas protein used. PAM sequences are typically 2-5 base pairs in length and are adjacent to (but located on a different strand of target DNA from) the target nucleotide sequence. PAM sequences can be identified using any suitable method, such as testing cleavage, targeting, or modification of oligonucleotides having the target nucleotide sequence and different PAM sequences.

[0148] Exemplary PAM sequences are provided in Tables 2 and 3. In certain embodiments, a Cas protein comprises MAD7 and the PAM is TTTN, wherein N is A, C, G, or T. In certain embodiments, a Cas protein comprises MAD7 and the PAM is CTTN, wherein N is A, C, G, or T. In certain embodiments, a Cas protein comprises AsCpf1 and the PAM is TTTN, wherein N is A, C, G, or T. In certain embodiments, a Cas protein comprises FnCpf1 and the PAM is 5′ TTN, wherein N is A, C, G, or T. PAM sequences for certain other type V-A Cas proteins are disclosed in Zetsche et al. (2015) CELL, 163:759 and U.S. Pat. No. 9,982,279. Further, engineering of the PAM Interacting (PI) domain of a Cas protein may allow programing of PAM specificity, improve target site recognition fidelity, and/or increase the versatility of an engineered, non-naturally occurring system. Exemplary approaches to alter the PAM specificity of Cpf1 are described in Gao et al. (2017) NAT. BIOTECHNOL., 35:789.

[0149] In certain embodiments, an engineered Cas protein comprises a modification that alters the Cas protein specificity in concert with modification to targeting range. Cas mutants can be designed to have increased target specificity as well as accommodating modifications in PAM recognition, for example by choosing mutations that alter PAM specificity (e.g., in the PI domain) and combining those mutations with groove mutations that increase (or if desired, decrease) specificity for the on-target locus versus off-target loci. The Cas modifications described herein can be used to counter loss of specificity resulting from alteration of PAM recognition, enhance gain of specificity resulting from alteration of PAM recognition, counter gain of specificity resulting from alteration of PAM recognition, or enhance loss of specificity resulting from alteration of PAM recognition.

[0150] In certain embodiments, an engineered Cas protein comprises one or more nuclear localization signal (NLS) motifs. In certain embodiments, an engineered Cas protein comprises at least 2 (e.g., at least 3, at least 4, at least 5, at least 6, at least 7, at least 8, at least 9, or at least 10) NLS motifs. Non-limiting examples of NLS motifs include: the NLS of SV40 large T-antigen, having the amino acid sequence of PKKKRKV (SEQ ID NO: 40): the NLS from nucleoplasmin, e.g., the nucleoplasmin bipartite NLS having the amino acid sequence of KRPAATKKAGQAKKKK (SEQ ID NO: 41); the c-myc NLS, having the amino acid sequence of PAAKRVKLD (SEQ ID NO: 42) or RQRRNELKRSP (SEQ ID NO: 43); the hRNPA1 M9 NLS, having the amino acid sequence of NQSSNFGPMKGGNFGGRSSGPYGGGGQYFAKPRNQGGY (SEQ ID NO: 44); the importin-α IBB domain NLS, having the amino acid sequence of RMRIZFKNKGKDTAELRRRRVEVSVELRKAKKDEQILKRRNV (SEQ ID NO: 45); the myoma T protein NLS, having the amino acid sequence of VSRKRPRP (SEQ ID NO: 46) or PPKKARED (SEQ ID NO: 47); the human p53 NLS, having the amino acid sequence of PQPKKKPL (SEQ ID NO: 48); the mouse c-abl IV NLS, having the amino acid sequence of SALIKKKKKMAP (SEQ ID NO: 49); the influenza virus NS1 NLS, having the amino acid sequence of DRLRR (SEQ ID NO: 50) or PKQKKRK (SEQ ID NO: 51); the hepatitis virus 8 antigen NLS, having the amino acid sequence of RKLKKKIKKL (SEQ ID NO: 52); the mouse Mxl protein NLS, having the amino acid sequence of REKKKFLKRR (SEQ ID NO: 53); the human poly (ADP-ribose) polymerase NLS, having the amino acid sequence of KRKGDEVDGVDEVAKKKSKK (SEQ ID NO: 54); the human glucocorticoid receptor NLS, having the amino acid sequence of RKCLQAGMNLEARKTKK (SEQ ID NO: 55), and synthetic NLS motifs such as PAAKKKKLD (SEQ ID NO: 56).

[0151] In general, the one or more NLS motifs are of sufficient strength to drive accumulation of the Cas protein in a detectable amount in the nucleus of a eukaryotic cell. The strength of nuclear localization activity may derive from the number of NLS motif(s) in the Cas protein, the particular NLS motif(s) used, the position(s) of the NLS motif(s), or a combination of these and/or other factors. In certain embodiments, an engineered Cas protein comprises at least 1 (e.g., at least 2, at least 3, at least 4, at least 5, at least 6, at least 7, at least 8, at least 9, or at least 10) NLS motif(s) at or near the N-terminus (e.g., within about 1, 2, 3, 4, 5, 10, 15, 20, 25, 30, 40, 50, or more amino acids along the polypeptide chain from the N-terminus). In certain embodiments, an engineered Cas protein comprises at least 1 (e.g., at least 2, at least 3, at least 4, at least 5, at least 6, at least 7, at least 8, at least 9, or at least 10) NLS motif(s) at or near the C-terminus (e.g., within about 1, 2, 3, 4, 5, 10, 15, 20, 25, 30, 40, 50, or more amino acids along the polypeptide chain from the C-terminus). In certain embodiments, an engineered Cas protein comprises at least 1 (e.g., at least 2, at least 3, at least 4, at least 5, at least 6, at least 7, at least 8, at least 9, or at least 10) NLS motif(s) at or near the C-terminus and at least 1 (e.g., at least 2, at least 3, at least 4, at least 5, at least 6, at least 7, at least 8, at least 9, or at least 10) NLS motif(s) at or near the N-terminus. In certain embodiments, the engineered Cas protein comprises one, two, or three NLS motifs at or near the C-terminus. In certain embodiments, the engineered Cas protein comprises one NLS motif at or near the N-terminus and one, two, or three NLS motifs at or near the C-terminus. In certain embodiments, the engineered Cas protein comprises a nucleoplasmin NLS at or near the C-terminus.

[0152] Detection of accumulation in the nucleus may be performed by any suitable technique. For example, a detectable marker may be fused to a nucleic acid-targeting protein, such that location within a cell may be visualized. Cell nuclei may also be isolated from cells, the contents of which may then be analyzed by any suitable process for detecting the protein, such as immunohistochemistry, Western blot, or enzyme activity assay. Accumulation in the nucleus may also be determined indirectly, such as by an assay that detects the effect of the nuclear import of a Cas protein complex (e.g., assay for DNA cleavage or mutation at the target locus, or assay for altered gene expression activity) as compared to a control not exposed to the Cas protein or exposed to a Cas protein lacking one or more of the NLS motifs.

[0153] A Cas protein may comprise a chimeric Cas protein, e.g., a Cas protein having enhanced function by being a chimera. Chimeric Cas proteins may be new Cas proteins containing fragments from more than one naturally occurring Cas protein or variants thereof. For example, fragments of multiple type V-A Cas homologs (e.g., orthologs) may be fused to form a chimeric Cas protein. In certain embodiments, a chimeric Cas protein comprises fragments of Cpf1 orthologs from multiple species and/or strains.

[0154] In certain embodiments, a Cas protein comprises one or more effector domains. The one or more effector domains may be located at or near the N-terminus of the Cas protein and/or at or near the C-terminus of the Cas protein. In certain embodiments, an effector domain comprised in the Cas protein is a transcriptional activation domain (e.g., VP64), a transcriptional repression domain (e.g., a KRAB domain or an SID domain), an exogenous nuclease domain (e.g., FokI), a deaminase domain (e.g., cytidine deaminase or adenine deaminase), or a reverse transcriptase domain (e.g., a high fidelity reverse transcriptase domain). Other activities of effector domains include but are not limited to methylase activity, demethylase activity, transcription release factor activity, translational initiation activity, translational activation activity, translational repression activity, histone modification (e.g., acetylation or demethylation) activity, single-stranded RNA cleavage activity, double-strand RNA cleavage activity, single-strand DNA cleavage activity, double-strand DNA cleavage activity, and nucleic acid binding activity.

[0155] In certain embodiments, a Cas protein comprises one or more protein domains that enhance homology-directed repair (HDR) and/or inhibit non-homologous end joining (NHEJ). Exemplary protein domains having such functions are described in Jayavaradhan et al. (2019) NAT. COMMUN. 10 (1): 2866 and Janssen et al. (2019) MOL. THER. NUCLEIC ACIDS 16:141-54. In certain embodiments, a Cas protein comprises a dominant negative version of p53-binding protein 1 (53BP1), for example, a fragment of 53BP1 comprising a minimum focus forming region (e.g., amino acids 1231-1644 of human 53BP1). In certain embodiments, a Cas protein comprises a motif that is targeted by APC-Cdh1, such as amino acids 1-110 of human Geminin, thereby resulting in degradation of the fusion protein during the HDR non-permissive G1 phase of the cell cycle.

[0156] In certain embodiments, a Cas protein comprises an inducible or controllable domain. Non-limiting examples of inducers or controllers include light, hormones, and small molecule drugs. In certain embodiments, a Cas protein comprises a light inducible or controllable domain. In certain embodiments, a Cas protein comprises a chemically inducible or controllable domain.

[0157] In certain embodiments, a Cas protein comprises a tag protein or peptide for ease of tracking and/or purification. Non-limiting examples of tag proteins and peptides include fluorescent proteins (e.g., green fluorescent protein (GFP), YFP, RFP, CFP, mCherry, tdTomato), HIS tags (e.g., 6×His tag, or gly-6×His: 8×His, or gly-8×His), hemagglutinin (HA) tag, FLAG tag, 3×FLAG tag, and Myc tag.

[0158] In certain embodiments, a Cas protein is conjugated to a non-protein moiety, such as a fluorophore useful for genomic imaging. In certain embodiments, a Cas protein is covalently conjugated to the non-protein moiety. The terms “CRISPR-Associated protein,” “Cas protein,” “Cas,” “CRISPR-Associated nuclease,” and “Cas nuclease” are used herein to include such conjugates despite the presence of one or more non-protein moieties.

### B. Guide Nucleic Acids

[0159] A guide nucleic acid can be a single gNA (sgNA, e.g., sgRNA), in which the gNA is a single polynucleotide, or a dual gNA (e.g., dual gRNA), in which the gNA comprises two separate polynucleotides (these can in some cases be covalently linked, but not via a conventional internucleotide linkage). In certain embodiments, a single guide nucleic acid is capable of activating a Cas nuclease alone (e.g., in the absence of a tracrRNA).

[0160] In general, a gNA comprises a modulator nucleic acid and a targeter nucleic acid. In a sgNA the modulator and targeter nucleic acids are part of a single polynucleotide. In a dual gNA the modulator and targeter nucleic acids are separate, e.g., not joined by a conventional nucleotide linkage, such as not joined at all. The targeter nucleic acid comprises a spacer sequence and a targeter stem sequence. The modulator nucleic acid comprises a modulator stem sequence and, generally, further nucleotides, such as nucleotides comprising a 5′ tail. The modulator stem sequence and targeter stem sequence can each comprise any suitable number of nucleotides and are of sufficient complementarity that they can hybridize. In a single gNA there may be additional NTs between the targeter stem sequence and the modulator stem sequence: these can, in certain cases, form secondary structure, such as a loop.

[0161] In certain embodiments, the guide nucleic acid comprises a targeter nucleic acid that, in combination with a modulator nucleic acid, is capable of binding a Cas protein. In certain embodiments, the guide nucleic acid comprises a targeter nucleic acid that, in combination with a modulator nucleic acid, is capable of activating a Cas nuclease. In certain embodiments, the system further comprises the Cas protein that the targeter nucleic acid and the modulator nucleic acid are capable of binding or the Cas nuclease that the targeter nucleic acid and the modulator nucleic acid are capable of activating.

[0162] It is contemplated that the single or dual guide nucleic acids need to be the compatible with a Cas protein (e.g., Cas nuclease) to provide an operative CRISPR system. For example, the targeter stem sequence and the modulator stem sequence can be derived from a naturally occurring crRNA capable of activating a Cas nuclease in the absence of a tracrRNA. Alternatively, the targeter stem sequence and the modulator stem sequence can be derived from a naturally occurring set of crRNA and tracrRNA, respectively, that are capable of activating a Cas nuclease. In certain embodiments, the nucleotide sequences of the targeter stem sequence and the modulator stem sequence are identical to the corresponding stem sequences of a stem-loop structure in such naturally occurring crRNA.

[0163] Guide nucleic acid sequences that are operative with a type II or type V Cas protein are known in the art and are disclosed, for example, in U.S. Pat. Nos. 9,790,490, 9,896,696, 10,113,179, and 10,266,850, and U.S. Patent Application Publication No. 2014/0242664. It is understood that these sequences are merely illustrative, and other guide nucleic acid sequences may also be used with these Cas proteins.

TABLE 2
Type V-A Cas Protein and Corresponding Single Guide Nucleic Acid Sequences

| Cas Protein | Scaffold Sequence¹ | PAM² |
|---|---|---|
| MAD7 (SEQ ID | UAAUUUCUACUCUUGUAGA (SEQ ID NO: 57), | 5′ TTTN |
| NO: 37) | AUCUACAACAGUAGA (SEQ ID NO: 58), | or 5′ |
| | AUCUACAAAAGUAGA (SEQ ID NO: 59), | CTTN |
| | GGAAUUUCUACUCUUGUAGA (SEQ ID NO: 60), | |
| | UAAUUCCCACUCUUGUGGG (SEQ ID NO: 61) | |
| MAD2 (SEQ ID | AUCUACAAGAGUAGA (SEQ ID NO: 62), | 5′ TTTN |
| NO: 38) | AUCUACAACAGUAGA (SEQ ID NO: 58), | |
| | AUCUACAAAAGUAGA (SEQ ID NO: 59), | |
| | AUCUACACUAGUAGA (SEQ ID NO: 63) | |
| AsCpf1 (SEQ | UAAUUUCUACUCUUGUAGA (SEQ ID NO: 57) | 5′ TTTN |
| ID NO: 3 of | | |
| WO | | |
| 2021/158918) | | |
| LbCpf1 (SEQ | UAAUUUCUACUAAGUGUAGA (SEQ ID NO: 64) | 5′ TTTN |
| ID NO: 4 of | | |
| WO | | |
| 2021/158918) | | |
| FnCpf1 (SEQ | UAAUUUUCUACUUGUUGUAGA (SEQ ID NO: 65) | 5′ TTN |
| ID NO: 5 of | | |
| WO | | |
| 2021/158918) | | |
| PbCpf1 (SEQ | AAUUUCUACUGUUGUAGA (SEQ ID NO: 66) | 5′ TTTC |
| ID NO: 6 of | | |
| WO | | |
| 2021/158918) | | |
| PsCpf1 (SEQ | AAUUUCUACUGUUGUAGA (SEQ ID NO: 66) | 5′ TTTC |
| ID NO: 7 of | | |
| WO | | |
| 2021/158918) | | |
| As2Cpf1 (SEQ | AAUUUCUACUGUUGUAGA (SEQ ID NO: 66) | 5′ TTTC |
| ID NO: 8 of | | |
| WO | | |
| 2021/158918) | | |
| McCpf1 (SEQ | GAAUUUCUACUGUUGUAGA (SEQ ID NO: 67) | 5′ TTTC |
| ID NO: 9 of | | |
| WO | | |
| 2021/158918) | | |
| Lb3Cpf1 (SEQ | GAAUUUCUACUGUUGUAGA (SEQ ID NO: 67) | 5′ TTTC |
| ID NO: 10 of | | |
| WO | | |
| 2021/158918) | | |
| EcCpf1 (SEQ | GAAUUUCUACUGUUGUAGA (SEQ ID NO: 67) | 5′ TTTC |
| ID NO: 11 of | | |
| WO | | |
| 2021/158918) | | |
| SmCsm1 (SEQ | GAAUUUCUACUGUUGUAGA (SEQ ID NO: 67) | 5′ TTTC |
| ID NO: 12 of | | |
| WO | | |
| 2021/158918) | | |
| SsCsm1 (SEQ | GAAUUUCUACUGUUGUAGA (SEQ ID NO: 67) | 5′ TTTC |
| ID NO: 13 of | | |
| WO | | |
| 2021/158918) | | |
| MbCsm1 (SEQ | GAAUUUCUACUGUUGUAGA (SEQ ID NO: 67) | 5′ TTTC |
| ID NO: 14 of | | |
| WO | | |
| 2021/158918) | | |
| ART2 (SEQ ID | GUCUAAAGGUACCACCAAAUUUCUACUGUUGUAGAU | 5′ TTTN |
| NO: 2 | (SEQ ID NO: 68) | or 5′ |
| | | NTTN |
| ART11 (SEQ ID | GCUUAGAACCUUUAAAUAAUUUCUACUAUUGUAGAU | 5′ TTTN |
| NO: 11 | (SEQ ID NO: 69) | or 5′ |
| | | NTTN |
| ART11* (SEQ | GCUUAGAACCUUUAAAUAAUUUCUACUAUUGUAGAU | 5′ TTTN |
| ID NO: 36 | (SEQ ID NO: 69) | or 5′ |
| | | NTTN |

¹The modulator sequence in the scaffold sequence is underlined; the targeter stem sequence in the scaffold sequence is bold-underlined. It is understood that a “scaffold sequence” listed herein constitutes a portion of a single guide nucleic acid. Additional nucleotide sequences, other than the spacer sequence, can be comprised in the single guide nucleic acid.
²In the consensus PAM sequences, N represents A, C, G, or T. Where the PAM sequence is preceded by “5′,” it means that the PAM is located immediately upstream of the target nucleotide sequence when using the non-target strand (i.e., the strand not hybridized with the spacer sequence) as the coordinate.

TABLE 3
Type V-A Cas Protein and Corresponding Dual Guide Nucleic Acid Sequences

| | | Targeter | |
|---|---|---|---|
| | | Stem | |
| Cas Protein | Modulator Sequence¹ | Sequence | PAM² |
| MAD7 (SEQ ID NO: | UAAUUUCUAC (SEQ ID NO: | GUAGA | 5′ TTTN |
| 37) | 70) | | or 5′ |
| | AUCUAC (SEQ ID NO: 71) | GUAGA | CTTN |
| | GGAAUUUCUAC (SEQ ID NO: | GUAGA | |
| | 72) | | |
| | UAAUUCCCAC (SEQ ID NO: | GUGGG | |
| | 73) | | |
| MAD2 (SEQ ID NO: | AUCUAC (SEQ ID NO: 71) | GUAGA | 5′ TTTN |
| 38) | | | |
| AsCpf1 (SEQ ID NO: | UAAUUUCUAC (SEQ ID NO: | GUAGA | 5′ TTTN |
| 3 of WO | 70) | | |
| 2021/158918) | | | |
| LbCpf1 (SEQ ID NO: | UAAUUUCUAC (SEQ ID NO: | GUAGA | 5′ TTTN |
| 4 of WO | 70) | | |
| 2021/158918) | | | |
| FnCpf1 (SEQ ID NO: | UAAUUUUCUACU (SEQ ID NO: | GUAGA | 5′ TTN |
| 5 of WO | 74) | | |
| 2021/158918) | | | |
| PbCpf1 (SEQ ID NO: | AAUUUCUAC (SEQ ID NO: 75) | GUAGA | 5′ TTTC |
| 6 of WO | | | |
| 2021/158918) | | | |
| PsCpf1 (SEQ ID NO: | AAUUUCUAC (SEQ ID NO: 75) | GUAGA | 5′ TTTC |
| 7 of WO | | | |
| 2021/158918) | | | |
| As2Cpf1 (SEQ ID | AAUUUCUAC (SEQ ID NO: 75) | GUAGA | 5′ TTTC |
| NO: 8 of WO | | | |
| 2021/158918) | | | |
| McCpf1 (SEQ ID NO: | GAAUUUCUAC (SEQ ID NO: | GUAGA | 5′ TTTC |
| 9 of WO | 76) | | |
| 2021/158918) | | | |
| Lb3Cpf1 (SEQ ID | GAAUUUCUAC (SEQ ID NO: | GUAGA | 5′ TTTC |
| NO: 10 of WO | 76) | | |
| 2021/158918) | | | |
| EcCpf1 (SEQ ID NO: | GAAUUUCUAC (SEQ ID NO: | GUAGA | 5′ TTTC |
| 11 of WO | 76) | | |
| 2021/158918) | | | |
| SmCsm1 (SEQ ID NO: | GAAUUUCUAC (SEQ ID NO: | GUAGA | 5′ TTTC |
| 12 of WO | 76) | | |
| 2021/158918) | | | |
| SsCsm1 (SEQ ID NO: | GAAUUUCUAC (SEQ ID NO: | GUAGA | 5′ TTTC |
| 13 of WO | 76) | | |
| 2021/158918) | | | |
| MbCsm1 (SEQ ID NO: | GAAUUUCUAC (SEQ ID NO: | GUAGA | 5′ TTTC |
| 14 of WO | 76) | | |
| 2021/158918) | | | |
| ART2 (SEQ ID NO: 2) | AAAUUUCUAC (SEQ ID NO: | GUAGA | 5′ TTTN |
| | 77) | | or 5′ |
| | | | NTTN |
| ART11 (SEQ ID NO: | UAAUUUCUAC (SEQ ID NO: | GUAGA | 5′ TTTN |
| 11) | 70) | | or 5′ |
| | | | NTTN |
| ART11* (SEQ ID NO: | UAAUUUCUAC (SEQ ID NO: | GUAGA | 5′ TTTN |
| 36) | 70) | | or 5′ |
| | | | NTTN |

¹It is understood that a “modulator sequence” listed herein may constitute the nucleotide sequence of a modulator nucleic acid. Alternatively, additional nucleotide sequences can be comprised in the modulator nucleic acid 5′ and/or 3′ to a ″modulator sequence″ listed herein.
²In the consensus PAM sequences, N represents A, C, G, or T. Where the PAM sequence is preceded by “5′,” it means that the PAM is located immediately upstream of the target nucleotide sequence when using the non-target strand (i.e., the strand not hybridized with the spacer sequence) as the coordinate.

[0164] In certain embodiments, a guide nucleic acid, in the context of a type V-A CRISPR-Cas system, comprises a targeter stem sequence listed in Table 3. The same targeter stem sequences, as a portion of scaffold sequences, are bold-underlined in Table 2.

[0165] In certain embodiments, a guide nucleic acid is a single guide nucleic acid that comprises, from 5′ to 3′, a modulator stem sequence, a loop sequence, a targeter stem sequence, and a spacer sequence. In certain embodiments, the targeter stem sequence in the single guide nucleic acid is listed in Table 2 as a bold-underlined portion of scaffold sequence, and the modulator stem sequence is complementary (e.g., 100% complementary) to the targeter stem sequence. In certain embodiments, the single guide nucleic acid comprises, from 5′ to 3′, a modulator sequence listed in Table 2 as an underlined portion of a scaffold sequence, a loop sequence, a targeter stem sequence a bold-underlined portion of the same scaffold sequence, and a spacer sequence. In certain embodiments, an engineered, non-naturally occurring system comprises a single guide nucleic acid comprising a scaffold sequence listed in Table 2. In certain embodiments, the system further comprises a Cas protein (e.g., Cas nuclease) comprising an amino acid sequence at least 30%, 40%, 50%, 60%, 70%, 80%, 85%, 90%, 91%, 92%, 93%, 94%, 95%, 96%, 97%, 98%, 99%, or 100% identical to the amino acid sequence set forth in the SEQ ID NO listed in the same line of Table 2. In certain embodiments, the system further comprises a Cas protein (e.g., Cas nuclease) comprising the amino acid sequence set forth in the SEQ ID NO listed in the same line of Table 2. In certain embodiments, the system is useful for targeting, editing, or modifying a nucleic acid comprising a target nucleotide sequence close or adjacent to (e.g., immediately downstream of) a PAM listed in the same line of Table 2 when using the non-target strand (i.e., the strand not hybridized with the spacer sequence) as the coordinate.

[0166] In certain embodiments, a guide nucleic acid, e.g., dual gNA, comprises a targeter guide nucleic acid that comprises, from 5′ to 3′, a targeter stem sequence and a spacer sequence. In certain embodiments, the targeter stem sequence in the targeter nucleic acid is listed in Table 3. In certain embodiments, an engineered, non-naturally occurring system comprises the targeter nucleic acid and a modulator stem sequence complementary (e.g., 100% complementary) to the targeter stem sequence. In certain embodiments, the modulator nucleic acid comprises a modulator sequence listed in the same line of Table 3. In certain embodiments, the system further comprises a Cas protein (e.g., Cas nuclease) comprising an amino acid sequence at least 30%, 40%, 50%, 60%, 70%, 80%, 85%, 90%, 91%, 92%, 93%, 94%, 95%, 96%, 97%, 98%, 99%, or 100% identical to the amino acid sequence set forth in the SEQ ID NO listed in the same line of Table 3. In certain embodiments, the system further comprises a Cas protein (e.g., Cas nuclease) comprising the amino acid sequence set forth in the SEQ ID NO listed in the same line of Table 3. In certain embodiments, the system is useful for targeting, editing, or modifying a nucleic acid comprising a target nucleotide sequence close or adjacent to (e.g., immediately downstream of) a PAM listed in the same line of Table 3 when using the non-target strand (i.e., the strand not hybridized with the spacer sequence) as the coordinate.

[0167] A single guide nucleic acid, the targeter nucleic acid, and/or the modulator nucleic acid can be synthesized chemically or produced in a biological process (e.g., catalyzed by an RNA polymerase in an in vitro reaction). Such reaction or process may limit the lengths of the single guide nucleic acid, targeter nucleic acid, and/or modulator nucleic acid. In certain embodiments, a single guide nucleic acid is no more than 100, 90, 80, 70, 60, 50, 40, 30, or 25 nucleotides in length. In certain embodiments, a single guide nucleic acid is at least 20, 25, 30, 40, 50, 60, 70, 80, or 90 nucleotides in length. In certain embodiments, the single guide nucleic acid is 20-100, 20-90, 20-80, 20-70, 20-60, 20-50, 20-40, 20-30, 20-25, 25-100, 25-90, 25-80, 25-70, 25-60, 25-50, 25-40, 25-30, 30-100, 30-90, 30-80, 30-70, 30-60, 30-50, 30-40, 40-100, 40-90, 40-80, 40-70, 40-60, 40-50, 50-100, 50-90, 50-80, 50-70, 50-60, 60-100, 60-90, 60-80, 60-70, 70-100, 70-90, 70-80, 80-100, 80-90, or 90-100 nucleotides in length. In certain embodiments, a targeter nucleic acid is no more than 100, 90, 80, 70, 60, 50, 40, 30, or 25 nucleotides in length. In certain embodiments, a targeter nucleic acid is at least 20, 25, 30, 40, 50, 60, 70, 80, or 90 nucleotides in length. In certain embodiments, the targeter nucleic acid is 20-100, 20-90, 20-80, 20-70, 20-60, 20-50, 20-40, 20-30, 20-25, 25-100, 25-90, 25-80, 25-70, 25-60, 25-50, 25-40, 25-30, 30-100, 30-90, 30-80, 30-70, 30-60, 30-50, 30-40, 40-100, 40-90, 40-80, 40-70, 40-60, 40-50, 50-100, 50-90, 50-80, 50-70, 50-60, 60-100, 60-90, 60-80, 60-70, 70-100, 70-90, 70-80, 80-100, 80-90, or 90-100 nucleotides in length. In certain embodiments, a modulator nucleic acid is no more than 100, 90, 80, 70, 60, 50, 40, 30, or 20 nucleotides in length. In certain embodiments, a modulator nucleic acid is at least 10, 15, 20, 25, 30, 40, 50, 60, 70, 80, or 90 nucleotides in length. In certain embodiments, the modulator nucleic acid is 10-100, 10-90, 10-80, 10-70, 10-60, 10-50, 10-40, 10-30, 10-20, 15-100, 15-90, 15-80, 15-70, 15-60, 15-50, 15-40, 15-30, 15-20, 20-100, 20-90, 20-80, 20-70, 20-60, 20-50, 20-40, 20-30, 25-100, 25-90, 25-80, 25-70, 25-60, 25-50, 25-40, 25-30, 30-100, 30-90, 30-80, 30-70, 30-60, 30-50, 30-40, 40-100, 40-90, 40-80, 40-70, 40-60, 40-50, 50-100, 50-90, 50-80, 50-70, 50-60, 60-100, 60-90, 60-80, 60-70, 70-100, 70-90, 70-80, 80-100, 80-90, or 90-100 nucleotides in length.

[0168] It is contemplated that the length of the duplex formed within the single guide nuclei acid or formed between the targeter nucleic acid and the modulator nucleic acid, e.g. in a dual gNA, may be a factor in providing an operative CRISPR system. In certain embodiments, the targeter stem sequence and the modulator stem sequence each consist of 4-10 nucleotides that base pair with each other. In certain embodiments, the targeter stem sequence and the modulator stem sequence each consist of 4-9, 4-8, 4-7, 4-6, 4-5, 5-10, 5-9, 5-8, 5-7, or 5-6 nucleotides that base pair with each other. In certain embodiments, the targeter stem sequence and the modulator stem sequence each consist of 4, 5, 6, 7, 8, 9, or 10 nucleotides. It is understood that the composition of the nucleotides in each sequence affects the stability of the duplex, and a C-G base pair confers greater stability than an A-U base pair. In certain embodiments, 20%-80%, 20%-70%, 20%-60%, 20%-50%, 20%-40%, 20%-30%, 30%-80%, 30%-70%, 30%-60%, 30%-50%, 30%-40%, 40%-80%, 40%-70%, 40%-60%, 40%-50%, 50%-80%, 50%-70%, 50%-60%, 60%-80%, 60%-70%, or 70%-80% of the base pairs are C-G base pairs.

[0169] In certain embodiments, the targeter stem sequence and the modulator stem sequence each consist of 5 nucleotides. As such, the targeter stem sequence and the modulator stem sequence form a duplex of 5 base pairs. In certain embodiments, 0-4, 0-3, 0-2, 0-1, 1-5, 1-4, 1-3, 1-2, 2-5, 2-4, 2-3, 3-5, 3-4, or 4-5 out of the 5 base pairs are C-G base pairs. In certain embodiments, 0, 1, 2, 3, 4, or 5 out of the 5 base pairs are C-G base pairs. In certain embodiments, the targeter stem sequence consists of 5′-GUAGA-3′ and the modulator stem sequence consists of 5′-UCUAC-3′. In certain embodiments, the targeter stem sequence consists of 5′-GUGGG-3′ and the modulator stem sequence consists of 5′-CCCAC-3′.

[0170] In certain embodiments, in a type V-A system, the 3′ end of the targeter stem sequence is linked by no more than 1, 2, 3, 4, 5, 6, 7, 8, 9, or 10 nucleotides to the 5′ end of the spacer sequence. In certain embodiments, the targeter stem sequence and the spacer sequence are adjacent to each other, directly linked by an internucleotide bond. In certain embodiments, the targeter stem sequence and the spacer sequence are linked by one nucleotide, e.g., a uridine. In certain embodiments, the targeter stem sequence and the spacer sequence are linked by two or more nucleotides. In certain embodiments, the targeter stem sequence and the spacer sequence are linked by 1, 2, 3, 4, 5, 6, 7, 8, 9, or 10 nucleotides.

[0171] In certain embodiments, the targeter nucleic acid further comprises an additional nucleotide sequence 5′ to the targeter stem sequence. In certain embodiments, the additional nucleotide sequence comprises at least 1 (e.g., at least 2, at least 3, at least 4, at least 5, at least 6, at least 7, at least 8, at least 9, at least 10, at least 15, at least 20, at least 25, at least 30, at least 35, at least 40, at least 45, or at least 50) nucleotides. In certain embodiments, the additional nucleotide sequence consists of 1, 2, 3, 4, 5, 6, 7, 8, 9, 10, 15, 20, 25, 30, 35, 40, 45, or 50 nucleotides. In certain embodiments, the additional nucleotide sequence consists of 2 nucleotides. In certain embodiments, the additional nucleotide sequence is reminiscent to the loop or a fragment thereof (e.g., one, two, three, or four nucleotides at the 3′ end of the loop) in a crRNA of a corresponding single guide CRISPR-Cas system. It is understood that an additional nucleotide sequence 5′ to the targeter stem sequence can be dispensable. Accordingly, in certain embodiments, the targeter nucleic acid does not comprise any additional nucleotide 5′ to the targeter stem sequence.

[0172] In certain embodiments, the targeter nucleic acid or the single guide nucleic acid further comprises an additional nucleotide sequence containing one or more nucleotides at the 3′ end that does not hybridize with the target nucleotide sequence. The additional nucleotide sequence may protect the targeter nucleic acid from degradation by 3′-5′ exonuclease. In certain embodiments, the additional nucleotide sequence is no more than 100 nucleotides in length. In certain embodiments, the additional nucleotide sequence is no more than 90, 80, 70, 60, 50, 40, 30, 20, or 10 nucleotides in length. In certain embodiments, the additional nucleotide sequence is at least 1, 2, 3, 4, 5, 6, 7, 8, 9, 10, 15, 20, 25, 30, 35, 40, 45, or 50 nucleotides in length. In certain embodiments, the additional nucleotide sequence is 5-100, 5-50, 5-40, 5-30, 5-25, 5-20, 5-15, 5-10, 10-100, 10-50, 10-40, 10-30, 10-25, 10-20, 10-15, 15-100, 15-50, 15-40, 15-30, 15-25, 15-20, 20-100, 20-50, 20-40, 20-30, 20-25, 25-100, 25-50, 25-40, 25-30, 30-100, 30-50, 30-40, 40-100, 40-50, or 50-100 nucleotides in length.

[0173] In certain embodiments, the additional nucleotide sequence forms a hairpin with the spacer sequence. Such secondary structure may increase the specificity of guide nucleic acid or the engineered, non-naturally occurring system (see, Kocak et al. (2019) Nat. Biotech. 37:657-66). In certain embodiments, the free energy change during the hairpin formation is greater than or equal to −20 kcal/mol, −15 kcal/mol, −14 kcal/mol, −13 kcal/mol, −12 kcal/mol, −11 kcal/mol, or −10 kcal/mol. In certain embodiments, the free energy change during the hairpin formation is greater than or equal to −5 kcal/mol, −6 kcal/mol, −7 kcal/mol, −8 kcal/mol, −9 kcal/mol, −10 kcal/mol, −11 kcal/mol, −12 kcal/mol, −13 kcal/mol, −14 kcal/mol, or −15 kcal/mol. In certain embodiments, the free energy change during the hairpin formation is in the range of −20 to −10 kcal/mol, −20 to −11 kcal/mol, −20 to −12 kcal/mol, −20 to −13 kcal/mol, −20 to −14 kcal/mol, −20 to −15 kcal/mol, −15 to −10 kcal/mol, −15 to −11 kcal/mol, −15 to −12 kcal/mol, −15 to −13 kcal/mol, −15 to −14 kcal/mol, −14 to −10 kcal/mol, −14 to −11 kcal/mol, −14 to −12 kcal/mol, −14 to −13 kcal/mol, −13 to −10 kcal/mol, −13 to −11 kcal/mol, −13 to −12 kcal/mol, −12 to −10 kcal/mol, −12 to −11 kcal/mol, or −11 to −10 kcal/mol. In other embodiments, the targeter nucleic acid or the single guide nucleic acid does not comprise any nucleotide 3′ to the spacer sequence.

[0174] In certain embodiments, the modulator nucleic acid further comprises an additional nucleotide sequence 3′ to the modulator stem sequence. In certain embodiments, the additional nucleotide sequence comprises at least 1 (e.g., at least 2, at least 3, at least 4, at least 5, at least 6, at least 7, at least 8, at least 9, at least 10, at least 15, at least 20, at least 25, at least 30, at least 35, at least 40, at least 45, or at least 50) nucleotides. In certain embodiments, the additional nucleotide sequence consists of 1, 2, 3, 4, 5, 6, 7, 8, 9, 10, 15, 20, 25, 30, 35, 40, 45, or 50 nucleotides. In certain embodiments, the additional nucleotide sequence consists of 1 nucleotide (e.g., uridine). In certain embodiments, the additional nucleotide sequence consists of 2 nucleotides. In certain embodiments, the additional nucleotide sequence is reminiscent to the loop or a fragment thereof (e.g., one, two, three, or four nucleotides at the 5′ end of the loop) in a crRNA of a corresponding single guide CRISPR-Cas system. It is understood that an additional nucleotide sequence 3′ to the modulator stem sequence can be dispensable. Accordingly, in certain embodiments, the modulator nucleic acid does not comprise any additional nucleotide 3″ to the modulator stem sequence.

[0175] It is understood that the additional nucleotide sequence 5′ to the targeter stem sequence and the additional nucleotide sequence 3′ to the modulator stem sequence, if present, may interact with each other. For example, although the nucleotide immediately 5′ to the targeter stem sequence and the nucleotide immediately 3′ to the modulator stem sequence do not form a Watson-Crick base pair (otherwise they would constitute part of the targeter stem sequence and part of the modulator stem sequence, respectively), other nucleotides in the additional nucleotide sequence 5′ to the targeter stem sequence and the additional nucleotide sequence 3′ to the modulator stem sequence may form one, two, three, or more base pairs (e.g., Watson-Crick base pairs). Such interaction may affect the stability of a complex comprising the targeter nucleic acid and the modulator nucleic acid.

[0176] The stability of a complex comprising a targeter nucleic acid and a modulator nucleic acid can be assessed by the Gibbs free energy change (AG) during the formation of the complex, cither calculated or actually measured. Where all the predicted base pairing in the complex occurs between a base in the targeter nucleic acid and a base in the modulator nucleic acid, i.e., there is no intra-strand secondary structure, the ΔG during the formation of the complex correlates generally with the ΔG during the formation of a secondary structure within the corresponding single guide nucleic acid. Methods of calculating or measuring the ΔG are known in the art. An exemplary method is RNAfold (rna.tbi.univie.ac.at/cgi-bin/RNA WebSuite/RNAfold.cgi) as disclosed in Gruber et al. (2008) Nucleic Acids Res., 36 (Web Server issue): W70-W74. Unless indicated otherwise, the ΔG values in the present disclosure are calculated by RNAfold for the formation of a secondary structure within a corresponding single guide nucleic acid. In certain embodiments, the ΔG is lower than or equal to −1 kcal/mol, e.g., lower than or equal to −2 kcal/mol, lower than or equal to −3 kcal/mol, lower than or equal to −4 kcal/mol, lower than or equal to −5 kcal/mol, lower than or equal to −6 kcal/mol, lower than or equal to −7 kcal/mol, lower than or equal to −7.5 kcal/mol, or lower than or equal to −8 kcal/mol. In certain embodiments, the ΔG is greater than or equal to −10 kcal/mol, e.g., greater than or equal to −9 kcal/mol, greater than or equal to −8.5 kcal/mol, or greater than or equal to −8 kcal/mol. In certain embodiments, the ΔG is in the range of-10 to −4 kcal/mol. In certain embodiments, the ΔG is in the range of −8 to −4 kcal/mol, −7 to −4 kcal/mol, −6 to −4 kcal/mol, −5 to −4 kcal/mol, −8 to −4.5 kcal/mol, −7 to −4.5 kcal/mol, −6 to −4.5 kcal/mol, or −5 to −4.5 kcal/mol. In certain embodiments, the ΔG is about −8 kcal/mol, −7 kcal/mol, −6 kcal/mol, −5 kcal/mol, −4.9 kcal/mol, −4.8 kcal/mol, −4.7 kcal/mol, −4.6 kcal/mol, −4.5 kcal/mol, −4.4 kcal/mol, −4.3 kcal/mol, −4.2 kcal/mol, −4.1 kcal/mol, or −4 kcal/mol.

[0177] It is understood that the ΔG may be affected by a sequence in the targeter nucleic acid that is not within the targeter stem sequence, and/or a sequence in the modulator nucleic acid that is not within the modulator stem sequence. For example, one or more base pairs (e.g., Watson-Crick base pair) between an additional sequence 5′ to the targeter stem sequence and an additional sequence 3′ to the modulator stem sequence may reduce the ΔG, i.e., stabilize the nucleic acid complex. In certain embodiments, the nucleotide immediately 5′ to the targeter stem sequence comprises a uracil or is a uridine, and the nucleotide immediately 3′ to the modulator stem sequence comprises a uracil or is a uridine, thereby forming a nonconventional U-U base pair.

[0178] In certain embodiments, the modulator nucleic acid or the single guide nucleic acid comprises a nucleotide sequence referred to herein as a “5′ tail” positioned 5′ to the modulator stem sequence. In a naturally occurring type V-A CRISPR-Cas system, the 5′ tail is a nucleotide sequence positioned 5′ to the stem-loop structure of the crRNA. A 5′ tail in an engineered type V-A CRISPR-Cas system, whether single guide or dual guide, can be reminiscent to the 5′ tail in a corresponding naturally occurring type V-A CRISPR-Cas system.

[0179] Without being bound by theory, it is contemplated that the 5′ tail may participate in the formation of the CRISPR-Cas complex. For example, in certain embodiments, the 5′ tail forms a pseudoknot structure with the modulator stem sequence, which is recognized by the Cas protein (see, Yamano et al. (2016) Cell, 165:949). In certain embodiments, the 5′ tail is at least 3 (e.g., at least 4 or at least 5) nucleotides in length. In certain embodiments, the 5′ tail is 3, 4, or 5 nucleotides in length. In certain embodiments, the nucleotide at the 3′ end of the 5′ tail comprises a uracil or is a uridine. In certain embodiments, the second nucleotide in the 5′ tail, the position counted from the 3′ end, comprises a uracil or is a uridine. In certain embodiments, the third nucleotide in the 5′ tail, the position counted from the 3′ end, comprises an adenine or is an adenosine. This third nucleotide may form a base pair (e.g., a Watson-Crick base pair) with a nucleotide 5′ to the modulator stem sequence. Accordingly, in certain embodiments, the modulator nucleic acid comprises a uridine or a uracil-containing nucleotide 5′ to the modulator stem sequence. In certain embodiments, the 5′ tail comprises the nucleotide sequence of 5′-AUU-3′. In certain embodiments, the 5′ tail comprises the nucleotide sequence of 5′-AAUU-3″. In certain embodiments, the 5′ tail comprises the nucleotide sequence of 5′-UAAUU-3′. In certain embodiments, the 5′ tail is positioned immediately 5′ to the modulator stem sequence.

[0180] In certain embodiments, the single guide nucleic acid, the targeter nucleic acid, and/or the modulator nucleic acid are designed to reduce the degree of secondary structure other than the hybridization between the targeter stem sequence and the modulator stem sequence. In certain embodiments, no more than about 75%, 50%, 40%, 30%, 25%, 20%, 15%, 10%, 5%, 1%, or fewer of the nucleotides of the single guide nucleic acid other than the targeter stem sequence and the modulator stem sequence participate in self-complementary base pairing when optimally folded. In certain embodiments, no more than about 75%, 50%, 40%, 30%, 25%, 20%, 15%, 10%, 5%, 1%, or fewer of the nucleotides of the targeter nucleic acid and/or the modulator nucleic acid participate in self-complementary base pairing when optimally folded. Optimal folding may be determined by any suitable polynucleotide folding algorithm. Some programs are based on calculating the minimal Gibbs free energy. An example of one such algorithm is mFold, as described by Zuker and Stiegler (Nucleic Acids Res. 9 (1981), 133-148). Another example folding algorithm is the online webserver RNAfold, developed at Institute for Theoretical Chemistry at the University of Vienna, using the centroid structure prediction algorithm (see e.g., A. R. Gruber et al., 2008, Cell 106 (1): 23-24; and PA Carr and GM Church, 2009, Nature Biotechnology 27 (12): 1151-62).

[0181] The targeter nucleic acid is directed to a specific target nucleotide sequence, and a donor template can be designed to modify the target nucleotide sequence or a sequence nearby. It is understood, therefore, that association of the single guide nucleic acid, the targeter nucleic acid, or the modulator nucleic acid with a donor template can increase editing efficiency and reduce off-targeting. Accordingly, in certain embodiments, the single guide nucleic acid or the modulator nucleic acid further comprises a donor template-recruiting sequence capable of hybridizing with a donor template (see FIG. 2B). Donor templates are described in the “Donor Templates” subsection of section II infra. The donor template and donor template-recruiting sequence can be designed such that they bear sequence complementarity. In certain embodiments, the donor template-recruiting sequence is at least 90% (e.g., at least 91%, at least 92%, at least 93%, at least 94%, at least 95%, at least 96%, at least 97%, at least 98%, or at least 99%) complementary to at least a portion of the donor template. In certain embodiments, the donor template-recruiting sequence is 100% complementary to at least a portion of the donor template. In certain embodiments, where the donor template comprises an engineered sequence not homologous to the sequence to be repaired, the donor template-recruiting sequence is capable of hybridizing with the engineered sequence in the donor template. In certain embodiments, the donor template-recruiting sequence is at least 20, 25, 30, 35, 40, 45, 50, 55, 60, 65, 70, 75, 80, 85, 90, 95, or 100 nucleotides in length. In certain embodiments, the donor template-recruiting sequence is positioned at or near the 5′ end of the single guide nucleic acid or at or near the 5′ end of the modulator nucleic acid. In certain embodiments, the donor template-recruiting sequence is linked to the 5′ tail, if present, or to the modulator stem sequence, of the single guide nucleic acid or the modulator nucleic acid through an internucleotide bond or a nucleotide linker.

[0182] In certain embodiments, the single guide nucleic acid or the modulator nucleic acid further comprises an editing enhancer sequence, which increases the efficiency of gene editing and/or homology-directed repair (HDR) (see FIG. 2C). Exemplary editing enhancer sequences are described in Park et al. (2018) Nat. Commun. 9:3313. In certain embodiments, the editing enhancer sequence is positioned 5′ to the 5′ tail, if present, or 5′ to the single guide nucleic acid or the modulator stem sequence. In certain embodiments, the editing enhancer sequence is 1-50, 4-50, 9-50, 15-50, 25-50, 1-25, 4-25, 9-25, 15-25, 1-15, 4-15, 9-15, 1-9, 4-9, or 1-4 nucleotides in length. In certain embodiments, the editing enhancer sequence is about 1, 2, 3, 4, 5, 6, 7, 8, 9, 10, 15, 20, 25, 30, 35, 40, 45, 50, or 55 nucleotides in length. The editing enhancer sequence is designed to minimize homology to the target nucleotide sequence or any other sequence that the engineered, non-naturally occurring system may be contacted to, e.g., the genome sequence of a cell into which the engineered, non-naturally occurring system is delivered. In certain embodiments, the editing enhancer is designed to minimize the presence of hairpin structure. The editing enhancer can comprise one or more of the chemical modifications disclosed herein.

[0183] The single guide nucleic acid, the modulator nucleic acid, and/or the targeter nucleic acid can further comprise a protective nucleotide sequence that prevents or reduces nucleic acid degradation. In certain embodiments, the protective nucleotide sequence is at least 5 (e.g., at least 10, at least 15, at least 20, at least 25, at least 30, at least 35, at least 40, at least 45, or at least 50) nucleotides in length. The length of the protective nucleotide sequence increases the time for an exonuclease to reach the 5′ tail, modulator stem sequence, targeter stem sequence, and/or spacer sequence, thereby protecting these portions of the single guide nucleic acid, the modulator nucleic acid, and/or the targeter nucleic acid from degradation by an exonuclease. In certain embodiments, the protective nucleotide sequence forms a secondary structure, such as a hairpin or a tRNA structure, to reduce the speed of degradation by an exonuclease (see, for example, Wu et al. (2018) Cell. Mol. Life Sci., 75 (19): 3593-3607). Secondary structures can be predicted by methods known in the art, such as the online webserver RNAfold developed at University of Vienna using the centroid structure prediction algorithm (see, Gruber et al. (2008) Nucleic Acids Res., 36: W70). Certain chemical modifications, which may be present in the protective nucleotide sequence, can also prevent or reduce nucleic acid degradation, as disclosed in the “RNA Modifications” subsection infra.

[0184] A protective nucleotide sequence is typically located at the 5′ or 3′ end of the single guide nucleic acid, the modulator nucleic acid, and/or the targeter nucleic acid. In certain embodiments, the single guide nucleic acid comprises a protective nucleotide sequence at the 5′ end, at the 3′ end, or at both ends, optionally through a nucleotide linker. In certain embodiments, the modulator nucleic acid comprises a protective nucleotide sequence at the 5′ end, at the 3′ end, or at both ends, optionally through a nucleotide linker. In particular embodiments, the modulator nucleic acid comprises a protective nucleotide sequence at the 5′ end (see FIG. 2A). In certain embodiments, the targeter nucleic acid comprises a protective nucleotide sequence at the 5′ end, at the 3′ end, or at both ends, optionally through a nucleotide linker.

[0185] As described above, various nucleotide sequences can be present in the 5′ portion of a single nucleic acid or a modulator nucleic acid, including but not limited to a donor template-recruiting sequence, an editing enhancer sequence, a protective nucleotide sequence, and a linker connecting such sequence to the 5′ tail, if present, or to the modulator stem sequence. It is understood that the functions of donor template recruitment, editing enhancement, protection against degradation, and linkage are not exclusive to each other, and one nucleotide sequence can have one or more of such functions. For example, in certain embodiments, the single guide nucleic acid or the modulator nucleic acid comprises a nucleotide sequence that is both a donor template-recruiting sequence and an editing enhancer sequence. In certain embodiments, the single guide nucleic acid or the modulator nucleic acid comprises a nucleotide sequence that is both a donor template-recruiting sequence and a protective sequence. In certain embodiments, the single guide nucleic acid or the modulator nucleic acid comprises a nucleotide sequence that is both an editing enhancer sequence and a protective sequence. In certain embodiments, the single guide nucleic acid or the modulator nucleic acid comprises a nucleotide sequence that is a donor template-recruiting sequence, an editing enhancer sequence, and a protective sequence. In certain embodiments, the nucleotide sequence 5′ to the 5′ tail, if present, or 5′ to the modulator stem sequence is 1-90, 1-80, 1-70, 1-60, 1-50, 1-40, 1-30, 1-20, 1-10, 10-90, 10-80, 10-70, 10-60, 10-50, 10-40, 10-30, 10-20, 20-90, 20-80, 20-70, 20-60, 20-50, 20-40, 20-30, 30-90, 30-80, 30-70, 30-60, 30-50, 30-40, 40-90, 40-80, 40-70, 40-60, 40-50, 50-90, 50-80, 50-70, 50-60, 60-90, 60-80, 60-70, 70-90, 70-80, or 80-90 nucleotides in length.

[0186] In certain embodiments, an engineered, non-naturally occurring system further comprises one or more compounds (e.g., small molecule compounds) that enhance HDR and/or inhibit NHEJ. Exemplary compounds having such functions are described in Maruyama et al. (2015) Nat Biotechnol. 33 (5): 538-42: Chu et al. (2015) Nat Biotechnol. 33 (5): 543-48; Yu et al. (2015) Cell Stem Cell 16 (2): 142-47: Pinder et al. (2015) Nucleic Acids Res. 43 (19): 9379-92; and Yagiz et al. (2019) Commun. Biol. 2:198. In certain embodiments, an engineered, non-naturally occurring system further comprises one or more compounds selected from the group consisting of DNA ligase IV antagonists (e.g., SCR7 compound, Ad4 E1B55K protein, and Ad4 E4orf6 protein), RAD51 agonists (e.g., RS-1), DNA-dependent protein kinase (DNA-PK) antagonists (e.g., NU7441 and KU0060648), B3-adrenergic receptor agonists (e.g., L755507), inhibitors of intracellular protein transport from the ER to the Golgi apparatus (e.g., brefeldin A), and any combinations thereof.

[0187] In certain embodiments, an engineered, non-naturally occurring system comprising a targeter nucleic acid and a modulator nucleic acid is tunable or inducible. For example, in certain embodiments, the targeter nucleic acid, the modulator nucleic acid, and/or the Cas protein can be introduced to the target nucleotide sequence at different times, the system becoming active only when all components are present. In certain embodiments, the amounts of the targeter nucleic acid, the modulator nucleic acid, and/or the Cas protein can be titrated to achieve desired efficiency and specificity. In certain embodiments, excess amount of a nucleic acid comprising the targeter stem sequence or the modulator stem sequence can be added to the system, thereby dissociating the complex of the targeter nucleic and modulator nucleic acid and turning off the system.

### C. gNA Modifications

[0188] Guide nucleic acids, including a single guide nucleic acid, a targeter nucleic acid, and/or a modulator nucleic acid, may comprise a DNA (e.g., modified DNA), an RNA (e.g., modified RNA), or a combination thereof. In certain embodiments, the single guide nucleic acid comprises a DNA (e.g., modified DNA), an RNA (e.g., modified RNA), or a combination thereof. In certain embodiments, the targeter nucleic acid comprises a DNA (e.g., modified DNA), an RNA (e.g., modified RNA), or a combination thereof. In certain embodiments, the modulator nucleic acid comprises a DNA (e.g., modified DNA), an RNA (e.g., modified RNA), or a combination thereof. Spacer sequences can be presented as DNA sequences by including thymidines (T) rather than uridines (U). It is understood that corresponding RNA sequences and DNA/RNA chimeric sequences are also contemplated. For example, where the spacer sequence is an RNA, its sequence can be derived from a DNA sequence disclosed herein by replacing each T with U. As a result, for the purpose of describing a nucleotide sequence, T and U are used interchangeably herein.

[0189] In certain embodiments engineered, non-naturally occurring systems comprising a targeter nucleic acid comprising: a spacer sequence designed to hybridize with a target nucleotide sequence and a targeter stem sequence; and a modulator nucleic acid comprising a modulator stem sequence complementary to the targeter stem sequence, and, optionally, a 5′ sequence, e.g., a tail sequence, wherein, in a single guide nucleic acid the targeter nucleic acid and the modulator nucleic acid are part of a single polynucleotide, and in a dual guide nucleic acid, the targeter nucleic acid and the modulator nucleic acid are separate nucleic acids: modifications can include one or more chemical modifications to one or more nucleotides or internucleotide linkages at or near the 3′ end of the targeter nucleic acid (dual and single gNA), at or near the 5′ end of the targeter nucleic acid (dual gNA), at or near the 3′ end of the modulator nucleic acid (dual gNA), at or near the 5′ end of the modulator nucleic acid (single and dual gNA), or combinations thereof as appropriate for single or dual gNA. In certain embodiments, the Cas nuclease is a type V-A Cas nuclease. Modulator and/or targeter nucleic sequences can include further sequences, as detailed in the Guide Nucleic Acids section, and modifications can be in these further sequences, as appropriate and apparent to one of skill in the art. In embodiments described in this section, below, in certain embodiments, guide nucleic acid is oriented from 5′ at the modulator nucleic acid to 3′ at the modulator stem sequence, and 5′ at the targeter stem sequence to 3′ at the targeter sequence (see, e.g., FIGS. 1A and 1B): in certain embodiments, as appropriate, guide nucleic acid is oriented from 3′ at the modulator nucleic acid to 5′ at the modulator stem sequence, and 3′ at the targeter stem sequence to 5′ at the targeter sequence.

[0190] The targeter nucleic acid may comprise a DNA (e.g., modified DNA), an RNA (e.g., modified RNA), or a combination thereof. The modulator nucleic acid may comprise a DNA (e.g., modified DNA), an RNA (e.g., modified RNA), or a combination thereof. In certain embodiments, the targeter nucleic acid is an RNA and the modulator nucleic acid is an RNA. A targeter nucleic acid in the form of an RNA is also called targeter RNA, and a modulator nucleic acid in the form of an RNA is also called modulator RNA. The nucleotide sequences disclosed herein are presented as DNA sequences by including thymidines (T) and/or RNA sequences including uridines (U). It is understood that corresponding DNA sequences, RNA sequences, and DNA/RNA chimeric sequences are also contemplated. For example, where a spacer sequence is presented as a DNA sequence, a nucleic acid comprising this spacer sequence as an RNA can be derived from the DNA sequence disclosed herein by replacing each T with U. As a result, for the purpose of describing a nucleotide sequence, T and U are used interchangeably herein.

[0191] In certain embodiments some or all of the gNA is RNA, e.g., a gRNA. In certain embodiments, 5-100%, 10-100%, 20-100%, 30-100%, 40-100%, 50-100%, 60-100%, 70-100%, 80-100%, 90-100%, 95-100%, 99-100%, 99.5-100% of the gNA is gRNA. In certain embodiments, 20%-80%, 20%-70%, 20%-60%, 20%-50%, 20%-40%, 20%-30%, 30%-80%, 30%-70%, 30%-60%, 30%-50%, 30%-40%, 40%-80%, 40%-70%, 40%-60%, 40%-50%, 50%-80%, 50%-70%, 50%-60%, 60%-80%, 60%-70%, or 70%-80% of gNA is RNA. In certain embodiments, 50% of the gNA is RNA. In certain embodiments, 70% of the gNA is RNA. In certain embodiments, 90% of the gNA is RNA. In certain embodiments, 100% of the gNA is RNA, e.g., a gRNA. In further embodiments, the remaining portion of the gNA that is not RNA comprises a modified ribonucleotide, a deoxyribonucleotide, a modified deoxyribonucleotide, or a synthetic, e.g., unnatural nucleotide, for example, not intended to be limiting, threose nucleic acid, locked nucleic acid, peptide nucleic acid, arabinonucleic acid, hexose nucleic acid, among others.

[0192] In certain embodiments, the targeter nucleic acid and/or the modulator nucleic acid are RNAs with one or more modifications in a ribose group, one or more modifications in a phosphate group, one or more modifications in a nucleobase, one or more terminal modifications, or a combination thereof. Exemplary modifications are disclosed in U.S. Pat. Nos. 10,900,034 and 10,767,175, U.S. Patent Application Publication No. 2018/0119140, Watts et al. (2008) Drug Discov. Today 13:842-55, and Hendel et al. (2015) NAT. BIOTECHNOL. 33:985.

[0193] In certain embodiments, a targeter nucleic acid, e.g., RNA, comprises at least one nucleotide at or near the 3′ end comprising a modification to a ribose, phosphate group, nucleobase, or terminal modification. In certain embodiments, the 3′ end of the targeter nucleic acid comprises the spacer sequence. In certain embodiments, the 3′ end of the targeter nucleic acid comprises the targeter stem sequence. Exemplary modifications are disclosed in Dang et al. (2015) Genome Biol. 16:280. Kocaz et al. (2019) Nature Biotech. 37:657-66, Liu et al. (2019) Nucleic Acids Res. 47 (8): 4169-4180. Schubert et al. (2018) J. Cytokine Biol. 3 (1): 121. Tong et al. (2019) Genome Biol. 20 (1): 15. Watts et al. (2008) Drug Discov. Today 13 (19-20): 842-55, and Wu et al. (2018) Cell Mol. Life. Sci. 75 (19): 3593-607.

[0194] Modifications in a ribose group include but are not limited to modifications at the 2′ position or modifications at the 4′ position. For example, in certain embodiments, the ribose comprises 2′-O—C1-4alkyl, such as 2′-O-methyl (2′-OMe, or M). In certain embodiments, the ribose comprises 2′-O—C1-3alkyl-O-C1-3alkyl, such as 2′-methoxyethoxy (2′-O—CH₂CH₂OCH₃) also known as 2′-O-(2-methoxyethyl) or 2′-MOE. In certain embodiments, the ribose comprises 2′-O-allyl. In certain embodiments, the ribose comprises 2′-O-2,4-Dinitrophenol (DNP). In certain embodiments, the ribose comprises 2′-halo, such as 2′-F, 2′-Br, 2′-Cl, or 2′-I. In certain embodiments, the ribose comprises 2′—NH₂. In certain embodiments, the ribose comprises 2′-H (e.g., a deoxynucleotide). In certain embodiments, the ribose comprises 2′-arabino or 2′-F-arabino. In certain embodiments, the ribose comprises 2′-LNA or 2′-ULNA. In certain embodiments, the ribose comprises a 4′-thioribosyl.

[0195] Modifications can also include a deoxy group, for example a 2′-deoxy-3′-phosphonoacetate (DP), a 2′-deoxy-3′-thiophosphonoacetate (DSP).

[0196] Internucleotide linkage modifications in a phosphate group include but are not limited to a phosphorothioate(S), a chiral phosphorothioate, a phosphorodithioate, a boranophosphonatc. a C₁₋₄alkyl phosphonate such as a methylphosphonate, a boranophosphonate, a phosphonocarboxylate such as a phosphonoacetate (P), a phosphonocarboxylate ester such as a phosphonoacetate ester, an amide, a thiophosphonocarboxylate such as a thiophosphonoacetate (SP), a thiophosphonocarboxylate ester such as a thiophosphonoacetate ester, and a 2′,5′-linkage having a phosphodiester or any of the modified phosphates above. Various salts, mixed salts and free acid forms are also included.

[0197] Modifications in a nucleobase include but are not limited to 2-thiouracil, 2-thiocytosine, 4-thiouracil, 6-thioguanine, 2-aminoadenine, 2-aminopurine, pseudouracil, hypoxanthine, 7-deazaguanine, 7-deaza-8-azaguanine, 7-deazaadenine, 7-deaza-8-azaadenine, 5-methylcytosine, 5-methyluracil, 5-hydroxymethylcytosine, 5-hydroxymethyluracil, 5,6-dehydrouracil, 5-propynylcytosine, 5-propynyluracil, 5-ethynyleytosine, 5-ethynyluracil, 5-allyluracil, 5-allylcytosine, 5-aminoallyluracil, 5-aminoallyl-cytosine, 5-bromouracil, 5-iodouracil, diaminopurine, difluorotoluene, dihydrouracil, an abasic nucleotide, Z base, P base, Unstructured Nucleic Acid, isoguanine, isocytosine (see. Piccirilli et al. (1990) NATURE. 343: 33), 5-methyl-2-pyrimidine (see, Rappaport (1993) BIOCHEMISTRY, 32:3047), x(A,G,C,T), and y(A,G,C,T).

[0198] Terminal modifications include but are not limited to polyethyleneglycol (PEG), hydrocarbon linkers (such as heteroatom (O,S,N)-substituted hydrocarbon spacers; halo-substituted hydrocarbon spacers; keto-, carboxyl-, amido-, thionyl-, carbamoyl-, thionocarbamaoyl-containing hydrocarbon spacers, propanediol), spermine linkers, dyes such as fluorescent dyes (for example, fluoresceins, rhodamines, cyanines), quenchers (for example, dabcyl, BHQ), and other labels (for example biotin, digoxigenin, acridine, streptavidin, avidin, peptides and/or proteins). In certain embodiments, a terminal modification comprises a conjugation (or ligation) of the RNA to another molecule comprising an oligonucleotide (such as deoxyribonucleotides and/or ribonucleotides), a peptide, a protein, a sugar, an oligosaccharide, a steroid, a lipid, a folic acid, a vitamin and/or other molecule. In certain embodiments, a terminal modification incorporated into the RNA is located internally in the RNA sequence via a linker such as 2-(4-butylamidofluorescein) propane-1.3-diol bis (phosphodiester) linker, which is incorporated as a phosphodiester linkage and can be incorporated anywhere between two nucleotides in the RNA.

[0199] The modifications disclosed above can be combined in the targeter nucleic acid and/or the modulator nucleic acid that are in the form of RNA. In certain embodiments, the modification in the RNA is selected from the group consisting of incorporation of 2′-O-methyl-3′phosphorothioate (MS), 2′-O-methyl-3′-phosphonoacetate (MP), 2′-O-methyl-3′-thiophosphonoacetate (MSP), 2′-halo-3′-phosphorothioate (e.g., 2′-fluoro-3′-phosphorothioate), 2′-halo-3′-phosphonoacetate (e.g., 2′-fluoro-3′-phosphonoacetate), and 2′-halo-3′-thiophosphonoacetate (e.g., 2′-fluoro-3′-thiophosphonoacetate).

[0200] In certain embodiments, modifications can include 2′-O-methyl (M), a phosphorothioate(S), a phosphonoacetate (P), a thiophosphonoacetate (SP), a 2′-O-methyl-3′-phosphorothioate (MS), a 2′-O-methyl-3′-phosphonoacetate (MP), a 2′-O-methyl-3′-thiophosphonoacetate (MSP), a 2′-deoxy-3′-phosphonoacetate (DP), a 2′-deoxy-3′-thiophosphonoacetate (DSP), or a combination thereof, at or near either the 3′ or 5′ end of either the targeter or modulator nucleic acid, as appropriate for single or dual gNA. In certain embodiments, modifications can include either a 5′ or a 3′ propanediol or C3 linker modification.

[0201] In certain embodiments, the modification alters the stability of the RNA. In certain embodiments, the modification enhances the stability of the RNA, e.g., by increasing nuclease resistance of the RNA relative to a corresponding RNA without the modification. Stability-enhancing modifications include but are not limited to incorporation of 2′-O-methyl, a 2′-O—C₁-alkyl, 2′-halo (e.g., 2′-F, 2′-Br, 2′-Cl, or 2′-I), 2′MOE, a 2′-O—C₁₋₃alkyl-O—C₁₋₃alkyl, 2′—NH₂, 2′-H (or 2′-deoxy), 2′-arabino, 2′-F-arabino, 4′-thioribosyl sugar moiety, 3′-phosphorothioate, 3′-phosphonoacetate, 3′-thiophosphonoacetate, 3′-methylphosphonate, 3′-boranophosphate, 3′-phosphorodithioate, locked nucleic acid (“LNA”) nucleotide which comprises a methylene bridge between the 2′ and 4′ carbons of the ribose ring, and unlocked nucleic acid (“ULNA”) nucleotide. Such modifications are suitable for use as a protecting group to prevent or reduce degradation of the 5′ sequence, e.g., a tail sequence, modulator stem sequence (dual guide nucleic acids), targeter stem sequence (dual guide nucleic acids), and/or spacer sequence (see, the “Targeter and Modulator nucleic acids” subsection).

[0202] In certain embodiments, the modification alters the specificity of the engineered, non-naturally occurring system. In certain embodiments, the modification enhances the specificity of the engineered, non-naturally occurring system, e.g., by enhancing on-target binding and/or cleavage, or reducing off-target binding and/or cleavage, or a combination thereof. Specificity-enhancing modifications include but are not limited to 2-thiouracil, 2-thiocytosine, 4-thiouracil, 6-thioguanine, 2-aminoadenine, and pseudouracil. Within 10, 5, 4, 3, 2, or 1 nucleotide of the 3″ end, for example the 3′ end nucleotide, is modified

[0203] In certain embodiments, the modification alters the immunostimulatory effect of the RNA relative to a corresponding RNA without the modification. For example, in certain embodiments, the modification reduces the ability of the RNA to activate TLR7, TLR8, TLR9, TLR3, RIG-I, and/or MDA5.

[0204] In certain embodiments, the targeter nucleic acid and/or the modulator nucleic acid comprise at least 1, 2, 3, 4, 5, 6, 7, 8, 9, 10, 11, 12, 13, 14, 15, 16, 17, 18, 19, 20, 21, 22, 23, 24, 25, 26, 27, 28, 29, 30, 31, 32, 33, 34, 35, 36, 37, 38, 39, or 40 modified nucleotides or internucleotide linkages. The modification can be made at one or more positions in the targeter nucleic acid and/or the modulator nucleic acid such that these nucleic acids retain functionality. For example, the modified nucleic acids can still direct the Cas protein to the target nucleotide sequence and allow the Cas protein to exert its effector function. It is understood that the particular modification(s) at a position may be selected based on the functionality of the nucleotide or internucleotide linkage at the position. For example, a specificity-enhancing modification may be suitable for a nucleotide or internucleotide linkage in the spacer sequence, the targeter stem sequence, or the modulator stem sequence. A stability-enhancing modification may be suitable for one or more terminal nucleotides or internucleotide linkages in the targeter nucleic acid and/or the modulator nucleic acid. In certain embodiments, at least 1 (e.g., at least 2, at least 3, at least 4, or at least 5) terminal nucleotides or internucleotide linkages at or near the 5′ end and/or at least 1 (e.g., at least 2, at least 3, at least 4, or at least 5) terminal nucleotides or internucleotide linkages at or near the 3′ end of the targeter nucleic acid are modified. In certain embodiments, 5 or fewer (e.g., 1 or fewer, 2 or fewer, 3 or fewer, or 4 or fewer) terminal nucleotides or internucleotide linkages at or near the 5′ end and/or 5 or fewer (e.g., 1 or fewer, 2 or fewer, 3 or fewer, or 4 or fewer) terminal nucleotides or internucleotide linkages at or near the 3′ end of the targeter nucleic acid are modified. In certain embodiments, at least 1 (e.g., at least 2, at least 3, at least 4, or at least 5) terminal nucleotides or internucleotide linkages at or near the 5′ end and/or at least 1 (e.g., at least 2, at least 3, at least 4, or at least 5) terminal nucleotides or internucleotide linkages at or near the 3′ end of the modulator nucleic acid are modified. In certain embodiments, 5 or fewer (e.g., 1 or fewer, 2 or fewer, 3 or fewer, or 4 or fewer) terminal nucleotides or internucleotide linkages at or near the 5′ end and/or 5 or fewer (e.g., 1 or fewer, 2 or fewer, 3 or fewer, or 4 or fewer) terminal nucleotides or internucleotide linkages at or near the 3′ end of the modulator nucleic acid are modified. Selection of positions for modifications is described in U.S. Pat. Nos. 10,900,034 and 10,767,175. As used in this paragraph, where the targeter or modulator nucleic acid is a combination of DNA and RNA, the nucleic acid as a whole is considered as an RNA, and the DNA nucleotide(s) are considered as modification(s) of the RNA, including a 2′-H modification of the ribose and optionally a modification of the nucleobase.

[0205] It is understood that, in dual guide nucleic acid systems the targeter nucleic acid and the modulator nucleic acid, while not in the same nucleic acids, i.e., not linked end-to-end through a traditional internucleotide bond, can be covalently conjugated to each other through one or more chemical modifications introduced into these nucleic acids, thereby increasing the stability of the double-stranded complex and/or improving other characteristics of the system.

IV. Composition and Methods for Targeting, Editing, and/or Modifying Genomic DNA

[0206] An engineered, non-naturally occurring system, such as disclosed herein, can be useful for targeting, editing, and/or modifying a target nucleic acid, such as a DNA (e.g., genomic DNA) in a cell or organism.

[0207] The present invention provides a method of cleaving a target nucleic acid (e.g., DNA) comprising the sequence of a preselected target sequence or a portion thereof, the method comprising contacting the target DNA with an engineered, non-naturally occurring system disclosed herein, thereby resulting in cleavage of the target DNA.

[0208] In addition, the present invention provides a method of binding a target nucleic acid (e.g., DNA) comprising the sequence of a preselected target sequence or a portion thereof, the method comprising contacting the target DNA with an engineered, non-naturally occurring system disclosed herein, thereby resulting in binding of the system to the target DNA. This method can be useful, e.g., for detecting the presence and/or location of the a preselected target gene, for example, if a component of the system (e.g., the Cas protein) comprises a detectable marker.

[0209] In addition, provided are methods of modifying a target nucleic acid (e.g., DNA) comprising the sequence of a preselected target sequence or a portion thereof, or a structure (e.g., protein) associated with the target DNA (e.g., a histone protein in a chromosome), the method comprising contacting the target DNA with an engineered, non-naturally occurring system disclosed herein, wherein the Cas protein comprises an effector domain or is associated with an effector protein, thereby resulting in modification of the target DNA or the structure associated with the target DNA. The modification corresponds to the function of the effector domain or effector protein. Exemplary functions described in the “Cas Proteins” subsection in Section I supra are applicable hereto.

[0210] An engineered, non-naturally occurring system can be contacted with the target nucleic acid as a complex. Accordingly, in certain embodiments, a method comprises contacting the target nucleic acid with a CRISPR-Cas complex comprising a targeter nucleic acid, a modulator nucleic acid, and a Cas protein disclosed herein. In certain embodiments, the Cas protein is a type V-A, type V-C, or type V-D Cas protein (e.g., Cas nuclease). In certain embodiments, the Cas protein is a type V-A Cas protein (e.g., Cas nuclease).

[0211] In certain embodiments, provided is a method of editing a human genomic sequence at one of a group of preselected target gene loci, the method comprising delivering an engineered, non-naturally occurring system disclosed herein into a human cell, thereby resulting in editing of the genomic sequence at the target gene locus in the human cell. In certain embodiments, provided herein is a method of detecting a human genomic sequence at one of a group of preselected target gene loci, the method comprising delivering the engineered, non-naturally occurring system disclosed herein into a human cell, wherein a component of the system (e.g., the Cas protein) comprises a detectable marker, thereby detecting the target gene locus in the human cell. In certain embodiments, provided herein is a method of modifying a human chromosome at one of a group of preselected target gene loci, the method comprising delivering the engineered, non-naturally occurring system disclosed herein into a human cell, wherein the Cas protein comprises an effector domain or is associated with an effector protein, thereby resulting in modification of the chromosome at the target gene locus in the human cell.

[0212] The CRISPR-Cas complex may be delivered to a cell by introducing a pre-formed ribonucleoprotein (RNP) complex into the cell. Alternatively, one or more components of the CRISPR-Cas complex may be expressed in the cell. Exemplary methods of delivery are known in the art and described in, for example, U.S. Pat. Nos. 8,697,359, 10,113,167, 10,570,418, 10,829,787, 11,118,194, and 11,125,739 and U.S. Patent Application Publication Nos. 2015/0344912. 2018/0119140, and 2018/0282763.

[0213] It is understood that contacting a DNA (e.g., genomic DNA) in a cell with a CRISPR-Cas complex does not require delivery of all components of the complex into the cell. For example, one or more of the components may be pre-existing in the cell. In certain embodiments, the cell (or a parental/ancestral cell thereof) has been engineered to express the Cas protein, and the single guide nucleic acid (or a nucleic acid comprising a regulatory element operably linked to a nucleotide sequence encoding the single guide nucleic acid), the targeter nucleic acid (or a nucleic acid comprising a regulatory element operably linked to a nucleotide sequence encoding the targeter nucleic acid), and/or the modulator nucleic acid (or a nucleic acid comprising a regulatory element operably linked to a nucleotide sequence encoding the modulator nucleic acid) are delivered into the cell. In certain embodiments, the cell (or a parental/ancestral cell thereof) has been engineered to express the modulator nucleic acid, and the Cas protein (or a nucleic acid comprising a regulatory element operably linked to a nucleotide sequence encoding the Cas protein) and the targeter nucleic acid (or a nucleic acid comprising a regulatory element operably linked to a nucleotide sequence encoding the targeter nucleic acid) are delivered into the cell. In certain embodiments, the cell (or a parental/ancestral cell thereof) has been engineered to express the Cas protein and the modulator nucleic acid, and the targeter nucleic acid (or a nucleic acid comprising a regulatory element operably linked to a nucleotide sequence encoding the targeter nucleic acid) is delivered into the cell.

[0214] In certain embodiments, the target DNA is in the genome of a target cell. Accordingly, the present invention also provides a cell comprising the non-naturally occurring system or a CRISPR expression system described herein. In addition, the present invention provides a cell whose genome has been modified by the CRISPR-Cas system or complex disclosed herein.

[0215] The target cells can be mitotic or post-mitotic cells from any organism, such as a bacterial cell (e.g., E coli), an archaeal cell, a cell of a single-cell eukaryotic organism, a plant cell, an algal cell, e.g., Botryococcus braunii, Chlamydomonas reinhardtii, Nannochloropsis gaditana, Chlorella pyrenoidosa, Sargassum patens C. Agardh, or the like, a fungal cell (e.g., a yeast cell, such as S, cervisiae), an animal cell, a cell from an invertebrate animal (e.g. fruit fly, enidarian, echinoderm, nematode, etc.), a cell from a vertebrate animal (e.g., fish, amphibian, reptile, bird, mammal), a cell from a mammal, a cell from a rodent, or a cell from a human. The types of target cells include but are not limited to a stem cell (e.g., an embryonic stem (ES) cell, an induced pluripotent stem (iPS) cell, a germ cell), a somatic cell (e.g., a fibroblast, a hematopoietic cell, a T lymphocyte (e.g., CD8+ T lymphocyte), an NK cell, a neuron, a muscle cell, a bone cell, a hepatocyte, a pancreatic cell), an in vitro or in vivo embryonic cell of an embryo at any stage (e.g., a 1-cell, 2-cell, 4-cell, 8-cell: stage zebrafish embryo). Cells may be from established cell lines or may be primary cells (i.e., cells and cells cultures that have been derived from a subject and allowed to grow in vitro for a limited number of passages of the culture). For example, primary cultures are cultures that may have been passaged within 0 times, 1 time, 2 times, 4 times, 5 times, 10 times, or 15 times, but not enough times to go through the crisis stage. Typically, the primary cell lines are maintained for fewer than 10 passages in vitro. If the cells are primary cells, they may be harvest from an individual by any suitable method. For example, leukocytes may be harvested by apheresis, leukocytapheresis, or density gradient separation, while cells from tissues such as skin, muscle, bone marrow, spleen, liver, pancreas, lung, intestine, or stomach can be harvested by biopsy. The harvested cells may be used immediately, or may be stored under frozen conditions with a cryopreservative and thawed at a later time in a manner as commonly known in the art.

### A. Ribonucleoprotein (RNP) Delivery and “Cas RNA” Delivery

[0216] An engineered, non-naturally occurring system disclosed herein can be delivered into a cell by suitable methods known in the art, including but not limited to ribonucleoprotein (RNP) delivery and “Cas RNA” delivery described below.

[0217] In certain embodiments, a CRISPR-Cas system including a single guide nucleic acid and a Cas protein, or a CRISPR-Cas system including a targeter nucleic acid, a modulator nucleic acid, and a Cas protein, can be combined into a RNP complex and then delivered into the cell as a pre-formed complex. This method is suitable for active modification of the genetic or epigenetic information in a cell during a limited time period. For example, where the Cas protein has nuclease activity to modify the genomic DNA of the cell, the nuclease activity only needs to be retained for a period of time to allow DNA cleavage, and prolonged nuclease activity may increase off-targeting. Similarly, certain epigenetic modifications can be maintained in a cell once established and can be inherited by daughter cells.

[0218] A “ribonucleoprotein” or “RNP,” as used herein, can refer to a complex comprising a nucleoprotein and a ribonucleic acid. A “nucleoprotein” as provided herein can refer to a protein capable of binding a nucleic acid (e.g., RNA, DNA). Where the nucleoprotein binds a ribonucleic acid it can be referred to as “ribonucleoprotein.” The interaction between the ribonucleoprotein and the ribonucleic acid may be direct, e.g., by covalent bond, or indirect, e.g., by non-covalent bond (e.g. electrostatic interactions (e.g. ionic bond, hydrogen bond, halogen bond), van der Waals interactions (e.g. dipole-dipole, dipole-induced dipole, London dispersion), ring stacking (pi effects), hydrophobic interactions, or the like). In certain embodiments, the ribonucleoprotein includes an RNA-binding motif non-covalently bound to the ribonucleic acid. For example, positively charged aromatic amino acid residues (e.g., lysine residues) in the RNA-binding motif may form electrostatic interactions with the negative nucleic acid phosphate backbones of the RNA.

[0219] To ensure efficient loading of the Cas protein, the single guide nucleic acid, or the combination of the targeter nucleic acid and the modulator nucleic acid, can be provided in excess molar amount (e.g., at least 2 fold, at least 3 fold, at least 4 fold, or at least 5 fold) relative to the Cas protein. In certain embodiments, the targeter nucleic acid and the modulator nucleic acid are annealed under suitable conditions prior to complexing with the Cas protein. In other embodiments, the targeter nucleic acid, the modulator nucleic acid, and the Cas protein are directly mixed together to form an RNP.

[0220] A variety of delivery methods can be used to introduce an RNP disclosed herein into a cell. Exemplary delivery methods or vehicles include but are not limited to microinjection, liposomes (see, e.g., U.S. Pat. No. 10,829,787,) such as molecular trojan horses liposomes that delivers molecules across the blood brain barrier (see, Pardridge et al. (2010) Cold Spring Harb. Protoc., doi: 10.1101/pdb.prot5407), immunoliposomes, virosomes, microvesicles (e.g., exosomes and ARMMs), polycations, lipid: nucleic acid conjugates, electroporation, cell permeable peptides (see, U.S. Pat. No. 11,118,194), nanoparticles, nanowires (see, Shalek et al. (2012) Nano Letters, 12:6498), exosomes, and perturbation of cell membrane (e.g., by passing cells through a constriction in a microfluidic system, see, U.S. Pat. No. 11,125,739). Where the target cell is a proliferating cell, the efficiency of RNP delivery can be enhanced by cell cycle synchronization (see, U.S. Pat. No. 10,570,418). In certain embodiments, an RNP is delivered into a cell by electroporation.

[0221] In certain embodiments, a CRISPR-Cas system is delivered into a cell in a “approach, i.e., delivering (a) a single guide nucleic acid, or a combination of a targeter nucleic acid and a modulator nucleic acid, and (b) an RNA (e.g., messenger RNA (mRNA)) encoding a Cas protein. The RNA encoding the Cas protein can be translated in the cell and form a complex with the single guide nucleic acid or combination of the targeter nucleic acid and the modulator nucleic acid intracellularly. Similar to the RNP approach, RNAs have limited half-lives in cells, even though stability-increasing modification(s) can be made in one or more of the RNAs. Accordingly, the “Cas RNA” approach is suitable for active modification of the genetic or epigenetic information in a cell during a limited time period, such as DNA cleavage, and has the advantage of reducing off-targeting.

[0222] The mRNA can be produced by transcription of a DNA comprising a regulatory element operably linked to a Cas coding sequence. Given that multiple copies of Cas protein can be generated from one mRNA, the single guide nucleic acid, or the targeter nucleic acid and the modulator nucleic acid are generally provided in excess molar amount (e.g., at least 5 fold, at least 10 fold, at least 20 fold, at least 30 fold, at least 50 fold, or at least 100 fold) relative to the mRNA. In certain embodiments, the targeter nucleic acid and the modulator nucleic acid are annealed under suitable conditions prior to delivery into the cells. In other embodiments, the targeter nucleic acid and the modulator nucleic acid are delivered into the cells without annealing in vitro.

[0223] A variety of delivery systems can be used to introduce an “Cas RNA” system into a cell. Non-limiting examples of delivery methods or vehicles include microinjection, biolistic particles, liposomes (see, e.g., U.S. Pat. No. 10,829,787) such as molecular trojan horses liposomes that delivers molecules across the blood brain barrier (see, Pardridge et al. (2010) Cold Spring Harb. Protoc., doi:10.1101/pdb.prot5407), immunoliposomes, virosomes, polycations, lipid: nucleic acid conjugates, electroporation, nanoparticles, nanowires (see, Shalek et al. (2012) Nano Letters, 12:6498), exosomes, and perturbation of cell membrane (e.g., by passing cells through a constriction in a microfluidic system, see, U.S. Pat. No. 11,125,739). Specific examples of the “nucleic acid only” approach by electroporation are described in International (PCT) Publication No. WO 2016/164356.

[0224] In certain embodiments, the CRISPR-Cas system is delivered into a cell in the form of (a) a single guide nucleic acid or a combination of a targeter nucleic acid and a modulator nucleic acid, and (b) a DNA comprising a regulatory element operably linked to a Cas coding sequence. The DNA can be provided in a plasmid, viral vector, or any other form described in the “CRISPR Expression Systems” subsection. Such delivery method may result in constitutive expression of Cas protein in the target cell (e.g., if the DNA is maintained in the cell in an episomal vector or is integrated into the genome), and may increase the risk of off-targeting which is undesirable when the Cas protein has nuclease activity. Notwithstanding, this approach is useful when the Cas protein comprises a non-nuclease effector (e.g., a transcriptional activator or repressor). It is also useful for research purposes and for genome editing of plants.

### B. CRISPR Expression Systems

[0225] Also provided herein is a nucleic acid comprising a regulatory element operably linked to a nucleotide sequence encoding a guide nucleic acid disclosed herein. In certain embodiments, the nucleic acid comprises a regulatory element operably linked to a nucleotide sequence encoding a single guide nucleic acid: this nucleic acid alone can constitute a CRISPR expression system. In certain embodiments, the nucleic acid comprises a regulatory element operably linked to a nucleotide sequence encoding a targeter nucleic acid. In certain embodiments, the nucleic acid further comprises a nucleotide sequence encoding a modulator nucleic acid, wherein the nucleotide sequence encoding the modulator nucleic acid is operably linked to the same regulatory element as the nucleotide sequence encoding the targeter nucleic acid or a different regulatory element: this nucleic acid alone can constitute a CRISPR expression system.

[0226] In addition, the present invention provides a CRISPR expression system comprising: (a) a nucleic acid comprising a first regulatory element operably linked to a nucleotide sequence encoding a targeter nucleic acid and (b) a nucleic acid comprising a second regulatory element operably linked to a nucleotide sequence encoding a modulator nucleic acid.

[0227] In certain embodiments, a CRISPR expression system further comprises a nucleic acid comprising a third regulatory element operably linked to a nucleotide sequence encoding a Cas protein, such as a Cas protein disclosed herein. In certain embodiments, the Cas protein is a type V-A, type V-C, or type V-D Cas protein (e.g., Cas nuclease). In certain embodiments, the Cas protein is a type V-A Cas protein (e.g., Cas nuclease).

[0228] As used in this context, the term “operably linked” can mean that the nucleotide sequence of interest is linked to the regulatory element in a manner that allows for expression of the nucleotide sequence (e.g., in an in vitro transcription/translation system or in a host cell when the vector is introduced into the host cell).

[0229] The nucleic acids of a CRISPR expression system described above may be independently selected from various nucleic acids such as DNA (e.g., modified DNA) and RNA (e.g., modified RNA). In certain embodiments, the nucleic acids comprising a regulatory element operably linked to one or more nucleotide sequences encoding the guide nucleic acids are in the form of DNA. In certain embodiments, the nucleic acid comprising a third regulatory element operably linked to a nucleotide sequence encoding the Cas protein is in the form of DNA. The third regulatory element can be a constitutive or inducible promoter that drives the expression of the Cas protein. In other embodiments, the nucleic acid comprising a third regulatory element operably linked to a nucleotide sequence encoding the Cas protein is in the form of RNA (e.g., mRNA).

[0230] Nucleic acids of a CRISPR expression system can be provided in one or more vectors. The term “vector,” as used herein, can refer to a nucleic acid molecule capable of transporting another nucleic acid to which it has been linked. Conventional viral and non-viral based gene transfer methods can be used to introduce nucleic acids in cells, such as prokaryotic cells, eukaryotic cells, mammalian cells, or target tissues. Non-viral vector delivery systems include DNA plasmids, RNA (e.g. a transcript of a vector described herein), naked nucleic acid, and nucleic acid complexed with a delivery vehicle, such as a liposome. Viral vector delivery systems include DNA and RNA viruses, which have either episomal or integrated genomes after delivery to the cell. Gene therapy procedures are known in the art and disclosed in Van Brunt (1988) BIOTECHNOLOGY, 6:1149; Anderson (1992) SCIENCE, 256:808; Nabel & Feigner (1993) TIBTECH, 11:211; Mitani & Caskey (1993) TIBTECH, 11:162: Dillon (1993) TIBTECH, 11:167; Miller (1992) NATURE, 357:455: Vigne, (1995) RESTORATIVE NEUROLOGY AND NEUROSCIENCE, 8:35: Kremer & Perricaudet (1995) BRITISH MEDICAL BULLETIN, 51:31: Haddada et al. (1995) CURRENT TOPICS IN MICROBIOLOGY AND IMMUNOLOGY, 199:297: Yu et al. (1994) GENE THERAPY, 1:13; and Doerfler and Bohm (Eds.) (2012) The Molecular Repertoire of Adenoviruses II: Molecular Biology of Virus-Cell Interactions. In certain embodiments, at least one of the vectors is a DNA plasmid. In certain embodiments, at least one of the vectors is a viral vector (e.g., retrovirus, adenovirus, or adeno-associated virus).

[0231] Certain vectors are capable of autonomous replication in a host cell into which they are introduced (e.g., bacterial vectors having a bacterial origin of replication and episomal mammalian vectors). Other vectors (e.g., non-episomal mammalian vectors and replication defective viral vectors) do not autonomously replicate in the host cell. Certain vectors, however, may be integrated into the genome of the host cell and thereby are replicated along with the host genome. A skilled person in the art will appreciate that different vectors may be suitable for different delivery methods and have different host tropism, and will be able to select one or more vectors suitable for the use.

[0232] The term “regulatory element.” as used herein, can refer to a transcriptional and/or translational control sequence, such as a promoter, enhancer, transcription termination signal (e.g., polyadenylation signal), internal ribosomal entry sites (IRES), protein degradation signal, or the like, that provide for and/or regulate transcription of a non-coding sequence (e.g., a targeter nucleic acid or a modulator nucleic acid) or a coding sequence (e.g., a Cas protein) and/or regulate translation of an encoded polypeptide. Such regulatory elements are described, for example, in Goeddel, GENE EXPRESSION TECHNOLOGY: METHODS IN ENZYMOLOGY, 185, Academic Press, San Diego, Calif. (1990). Regulatory elements include those that direct constitutive expression of a nucleotide sequence in many types of host cell and those that direct expression of the nucleotide sequence only in certain host cells (e.g., tissue-specific regulatory sequences). A tissue-specific promoter may direct expression primarily in a desired tissue of interest, such as muscle, neuron, bone, skin, blood, specific organs (e.g., liver, pancreas), or particular cell types (e.g., lymphocytes). Regulatory elements may also direct expression in a temporal-dependent manner, such as in a cell-cycle dependent or developmental stage-dependent manner, which may or may not also be tissue or cell-type specific. In certain embodiments, a vector comprises one or more pol III promoter (e.g., 1, 2, 3, 4, 5, or more pol III promoters), one or more pol II promoters (e.g., 1, 2, 3, 4, 5, or more pol II promoters), one or more pol I promoters (e.g., 1, 2, 3, 4, 5, or more pol I promoters), or combinations thereof. Examples of pol III promoters include, but are not limited to, U6 and HI promoters. Examples of pol II promoters include, but are not limited to, the retroviral Rous sarcoma virus (RSV) LTR promoter (optionally with the RSV enhancer), the cytomegalovirus (CMV) promoter (optionally with the CMV enhancer), the SV40 promoter, the dihydrofolate reductase promoter, the B-actin promoter, the phosphoglycerol kinase (PGK) promoter, and the EF1α promoter. Also encompassed by the term “regulatory element” are enhancer elements, such as WPRE: CMV enhancers: the R-U5′ segment in LTR of HTLV-I (see, Takebe et al. (1988) MOL. CELL. BIOL., 8:466): SV40 enhancer; and the intron sequence between exons 2 and 3 of rabbit β-globin (see, O'Hare et al. (1981) PROC. NATL. ACAD. SCI. USA., 78:1527). It will be appreciated by those skilled in the art that the design of the expression vector can depend on factors such as the choice of the host cell to be transformed, the level of expression desired, etc. A vector can be introduced into host cells to produce transcripts, proteins, or peptides, including fusion proteins or peptides, encoded by nucleic acids as described herein (e.g., CRISPR transcripts, proteins, enzymes, mutant forms thereof, or fusion proteins thereof).

[0233] In certain embodiments, the nucleotide sequence encoding the Cas protein is codon optimized for expression in a prokaryotic cell, e.g., E coli, eukaryotic host cell, e.g., a yeast cell (e.g., S, cerevisiae), a mammalian cell (e.g., a mouse cell, a rat cell, or a human cell), or a plant cell. Various species exhibit particular bias for certain codons of a particular amino acid. Codon bias (differences in codon usage between organisms) often correlates with the efficiency of translation of messenger RNA (mRNA), which is in turn believed to be dependent on, among other things, the properties of the codons being translated and the availability of particular transfer RNA (tRNA) molecules. The predominance of selected tRNAs in a cell is generally a reflection of the codons used most frequently in peptide synthesis. Accordingly, genes can be tailored for optimal gene expression in a given organism based on codon optimization. Codon usage tables are readily available, for example, at the “Codon Usage Database” available at kazusa.or.jp/codon/and these tables can be adapted in a number of ways (see, Nakamura et al. (2000) NUCL. ACIDS RES., 28:292). Computer algorithms for codon optimizing a particular sequence for expression in a particular host cell, such as Gene Forge (Aptagen: Jacobus, Pa.), are also available. In certain embodiments, the codon optimization facilitates or improves expression of the Cas protein in the host cell.

### C. Donor Templates

[0234] Cleavage of a target nucleotide sequence in the genome of a cell by a CRISPR-Cas system or complex can activate DNA damage pathways, which may rejoin the cleaved DNA fragments by NHEJ or HDR. HDR requires a repair template, either endogenous or exogenous, to transfer the sequence information from the repair template to the target.

[0235] In certain embodiments, an engineered, non-naturally occurring system or CRISPR expression system further comprises a donor template. As used herein, the term “donor template” can refer to a nucleic acid designed to serve as a repair template at or near the target nucleotide sequence upon introduction into a cell or organism. In certain embodiments, the donor template is complementary to a polynucleotide comprising the target nucleotide sequence or a portion thereof. When optimally aligned, a donor template may overlap with one or more nucleotides of a target nucleotide sequences (e.g. about or more than about 1, 5, 10, 15, 20, 25, 30, 35, 40, or more nucleotides). The nucleotide sequence of the donor template is typically not identical to the genomic sequence that it replaces. Rather, the donor template may contain one or more substitutions, insertions, deletions, inversions or rearrangements with respect to the genomic sequence, so long as sufficient homology is present to support homology-directed repair. In certain embodiments, the donor template comprises a non-homologous sequence flanked by two regions of homology (i.e., homology arms), such that homology-directed repair between the target DNA region and the two flanking sequences results in insertion of the non-homologous sequence at the target region. In certain embodiments, the donor template comprises a non-homologous sequence 10-100 nucleotides, 50-500 nucleotides, 100-1,000 nucleotides, 200-2,000 nucleotides, or 500-5,000 nucleotides in length positioned between two homology arms.

[0236] Generally, the homologous region(s) of a donor template has at least 50% sequence identity to a genomic sequence with which recombination is desired. The homology arms are designed or selected such that they are capable of recombining with the nucleotide sequences flanking the target nucleotide sequence under intracellular conditions. In certain embodiments, where HDR of the non-target strand is desired, the donor template comprises a first homology arm homologous to a sequence 5′ to the target nucleotide sequence and a second homology arm homologous to a sequence 3′ to the target nucleotide sequence. In certain embodiments, the first homology arm is at least 50% (e.g., at least 60%, at least 70%, at least 75%, at least 80%, at least 85%, at least 90%, at least 91%, at least 92%, at least 93%, at least 94%, at least 95%, at least 96%, at least 97%, at least 98%, at least 99%, or 100%) identical to a sequence 5′ to the target nucleotide sequence. In certain embodiments, the second homology arm is at least 50% (e.g., at least 60%, at least 70%, at least 75%, at least 80%, at least 85%, at least 90%, at least 91%, at least 92%, at least 93%, at least 94%, at least 95%, at least 96%, at least 97%, at least 98%, at least 99%, or 100%) identical to a sequence 3′ to the target nucleotide sequence. In certain embodiments, when the donor template sequence and a polynucleotide comprising a target nucleotide sequence are optimally aligned, the nearest nucleotide of the donor template is within about 1, 5, 10, 15, 20, 25, 50, 75, 100, 200, 300, 400, 500, 1000, 2000, 3000, 4000, or more nucleotides from the target nucleotide sequence.

[0237] In certain embodiments, the donor template further comprises an engineered sequence not homologous to the sequence to be repaired. Such engineered sequence can harbor a barcode and/or a sequence capable of hybridizing with a donor template-recruiting sequence disclosed herein.

[0238] In certain embodiments, the donor template further comprises one or more mutations relative to the genomic sequence, wherein the one or more mutations reduce or prevent cleavage, by the same CRISPR-Cas system, of the donor template or of a modified genomic sequence with at least a portion of the donor template sequence incorporated. In certain embodiments, in the donor template, the PAM adjacent to the target nucleotide sequence and recognized by the Cas nuclease is mutated to a sequence not recognized by the same Cas nuclease. In certain embodiments, in the donor template, the target nucleotide sequence (e.g., the seed region) is mutated. In certain embodiments, the one or more mutations are silent with respect to the reading frame of a protein-coding sequence encompassing the mutated sites.

[0239] The donor template can be provided to the cell as single-stranded DNA, single-stranded RNA, double-stranded DNA, or double-stranded RNA. It is understood that a CRISPR-Cas system, such as a system disclosed herein, may possess nuclease activity to cleave the target strand, the non-target strand, or both. When HDR of the target strand is desired, a donor template having a nucleic acid sequence complementary to the target strand is also contemplated.

[0240] The donor template can be introduced into a cell in linear or circular form. If introduced in linear form, the ends of the donor template may be protected (e.g., from exonucleolytic degradation) by methods known to those of skill in the art. For example, one or more dideoxynucleotide residues are added to the 3′ terminus of a linear molecule and/or self-complementary oligonucleotides are ligated to one or both ends (see, for example, Chang et al. (1987) PROC. NATL. ACAD SCI USA, 84:4959; Nehls et al. (1996) SCIENCE, 272:886; see also the chemical modifications for increasing stability and/or specificity of RNA disclosed supra). Additional methods for protecting exogenous polynucleotides from degradation include, but are not limited to, addition of terminal amino group(s) and the use of modified internucleotide linkages such as, for example, phosphorothioates, phosphoramidates, and O-methyl ribose or deoxyribose residues. As an alternative to protecting the termini of a linear donor template, additional lengths of sequence may be included outside of the regions of homology that can be degraded without impacting recombination.

[0241] A donor template can be a component of a vector as described herein, contained in a separate vector, or provided as a separate polynucleotide, such as an oligonucleotide, linear polynucleotide, or synthetic polynucleotide. In certain embodiments, the donor template is a DNA. In certain embodiments, a donor template is in the same nucleic acid as a sequence encoding the single guide nucleic acid, a sequence encoding the targeter nucleic acid, a sequence encoding the modulator nucleic acid, and/or a sequence encoding the Cas protein, where applicable. In certain embodiments, a donor template is provided in a separate nucleic acid. A donor template polynucleotide may be of any suitable length, such as about or at least about 50, 75, 100, 150, 200, 500, 1000, 2000, 3000, 4000, or more nucleotides in length.

[0242] A donor template can be introduced into a cell as an isolated nucleic acid. Alternatively, a donor template can be introduced into a cell as part of a vector (e.g., a plasmid) having additional sequences such as, for example, replication origins, promoters and genes encoding antibiotic resistance, that are not intended for insertion into the DNA region of interest. Alternatively, a donor template can be delivered by viruses (e.g., adenovirus, adeno-associated virus (AAV)). In certain embodiments, the donor template is introduced as an AAV, e.g., a pseudotyped AAV. The capsid proteins of the AAV can be selected by a person skilled in the art based upon the tropism of the AAV and the target cell type. For example, in certain embodiments, the donor template is introduced into a hepatocyte as AAV8 or AAV9. In certain embodiments, the donor template is introduced into a hematopoietic stem cell, a hematopoietic progenitor cell, or a T lymphocyte (e.g., CD8+ T lymphocyte) as AAV6 or an AAVHSC (see, U.S. Pat. No. 9,890,396). It is understood that the sequence of a capsid protein (VP1, VP2, or VP3) may be modified from a wild-type AAV capsid protein, for example, having at least 50% (e.g., at least 60%, at least 70%, at least 75%, at least 80%, at least 85%, at least 90%, at least 91%, at least 92%, at least 93%, at least 94%, at least 95%, at least 96%, at least 97%, at least 98%, or at least 99%) sequence identity to a wild-type AAV capsid sequence.

[0243] The donor template can be delivered to a cell (e.g., a primary cell) by various delivery methods, such as a viral or non-viral method disclosed herein. In certain embodiments, a non-viral donor template is introduced into the target cell as a naked nucleic acid or in complex with a liposome or poloxamer. In certain embodiments, a non-viral donor template is introduced into the target cell by electroporation. In other embodiments, a viral donor template is introduced into the target cell by infection. The engineered, non-naturally occurring system can be delivered before, after, or simultaneously with the donor template (see, International (PCT) Application Publication No. WO 2017/053729). A skilled person in the art will be able to choose proper timing based upon the form of delivery (consider, for example, the time needed for transcription and translation of RNA and protein components) and the half-life of the molecule(s) in the cell. In particular embodiments, where the CRISPR-Cas system including the Cas protein is delivered by electroporation (e.g., as an RNP), the donor template (e.g., as an AAV) is introduced into the cell within 4 hours (e.g., within 1, 2, 3, 4, 5, 6, 7, 8, 9, 10, 11, 12, 13, 14, 15, 16, 17, 18, 19, 20, 25, 30, 35, 40, 45, 50, 55, 60, 90, 120, 150, 180, 210, or 240 minutes) after the introduction of the engineered, non-naturally occurring system.

[0244] In certain embodiments, the donor template is conjugated covalently to a modulator nucleic acid. Covalent linkages suitable for this conjugation are known in the art and are described, for example, in U.S. Pat. No. 9,982,278 and Savic et al. (2018) ELIFE 7: e33761. In certain embodiments, the donor template is covalently linked to a modulator nucleic acid (e.g., the 5′ end of the modulator nucleic acid) through an internucleotide bond. In certain embodiments, the donor template is covalently linked to a modulator nucleic acid (e.g., the 5′ end of the modulator nucleic acid) through a linker.

[0245] In certain embodiments, the donor template can comprise any nucleic acid chemistry. In certain embodiments, the donor template can comprise DNA and/or RNA nucleotides. In certain embodiments, the donor template can comprise single-stranded DNA, linear single-stranded RNA, linear double-stranded DNA, linear double-stranded RNA, circular single-stranded DNA, circular single-stranded RNA, circular double-stranded DNA, or circular double-stranded RNA. In certain embodiments, the donor template comprises a mutation in a PAM sequence to partially or completely abolish binding of the RNP to the DNA. In certain embodiments, the donor template is present at a concentration of at least 0.05, 0.01, 0.2, 0.3, 0.4, 0.5, 0.6, 0.7, 0.8, 0.9, 1, 1.25, 1.5, 1.75, 2, 3, or 4, and/or no more than 0.01, 0.2, 0.3, 0.4, 0.5, 0.6, 0.7, 0.8, 0.9, 1, 1.25, 1.5, 1.75, 2, 3, 4, or 5 μg μL⁻¹, for example 0.01-5 μg μL⁻¹. In certain embodiments, the donor template comprises one or more promoters. In certain embodiments, the donor template comprises a promoter that shares at least 70%, at least 75%, at least 80%, at least 85%, at least 90%, at least 95%, at least 99.5% sequence identity with any one of SEQ ID NOs: 78-85 of Table 4.

TABLE 4
Promoter sequences

| | SEQ ID | |
|---|---|---|
| Name | NO | Sequence |
| CMV | 78 | CGTTACATAACTTACGGTAAATGGCCCGCCTGGCTGACCGCCCAACG |
| | | ACCCCCGCCCATTGACGTCAATAATGACGTATGTTCCCATAGTAACG |
| | | CCAATAGGGACTTTCCATTGACGTCAATGGGTGGAGTATTTACGGTA |
| | | AACTGCCCACTTGGCAGTACATCAAGTGTATCATATGCCAAGTACGC |
| | | CCCCTATTGACGTCAATGACGGTAAATGGCCCGCCTGGCATTATGCC |
| | | CAGTACATGACCTTATGGGACTTTCCTACTTGGCAGTACATCTACGT |
| | | ATTAGTCATCGCTATTACCATGGTGATGCGGTTTTGGCAGTACATCA |
| | | ATGGGCGTGGATAGCGGTTTGACTCACGGGGATTTCCAAGTCTCCAC |
| | | CCCATTGACGTCAATGGGAGTTTGTTTTGGCACCAAAATCAACGGGA |
| | | CTTTCCAAAATGTCGTAACAACTCCGCCCCATTGACGCAAATGGGCG |
| | | GTAGGCGTGTACGGTGGGAGGTCTATATAAGCAGAGCT |
| SCP | 79 | GTACTTATATAAGGGGGTGGGGGCGCGTTCGTCCTCAGTCGCGATCG |
| | | AACACTCGAGCCGAGCAGACGTGCCTACGGACCG |
| CMVe- | 80 | CGTTACATAACTTACGGTAAATGGCCCGCCTGGCTGACCGCCCAACG |
| SCP | | ACCCCCGCCCATTGACGTCAATAATGACGTATGTTCCCATAGTAACG |
| | | CCAATAGGGACTTTCCATTGACGTCAATGGGTGGAGTATTTACGGTA |
| | | AACTGCCCACTTGGCAGTACATCAAGTGTATCATATGCCAAGTACGC |
| | | CCCCTATTGACGTCAATGACGGTAAATGGCCCGCCTGGCATTATGCC |
| | | CAGTACATGACCTTATGGGACTTTCCTACTTGGCAGTACATCTACGT |
| | | ATTAGTCATCGCTATTACCATGGTACTTATATAAGGGGGTGGGGGCG |
| | | CGTTCGTCCTCAGTCGCGATCGAACACTCGAGCCGAGCAGACGTGCC |
| | | TACGGACCG |
| CMVmax | 81 | TCAATATTGGCCATTAGCCATATTATTCATTGGTTATATAGCATAAA |
| | | TCAATATTGGCTATTGGCCATTGCATACGTTGTATCTATATCATAAT |
| | | ATGTACATTTATATTGGCTCATGTCCAATATGACCGCCATGTTGGCA |
| | | TTGATTATTGACTAGTTATTAATAGTAATCAATTACGGGGTCATTAG |
| | | TTCATAGCCCATATATGGAGTTCCGCGTTACATAACTTACGGTAAAT |
| | | GGCCCGCCTGGCTGACCGCCCAACGACCCCCGCCCATTGACGTCAAT |
| | | AATGACGTATGTTCCCATAGTAACGCCAATAGGGACTTTCCATTGAC |
| | | GTCAATGGGTGGAGTATTTACGGTAAACTGCCCACTTGGCAGTACAT |
| | | CAAGTGTATCATATGCCAAGTCCGCCCCCTATTGACGTCAATGACGG |
| | | TAAATGGCCCGCCTGGCATTATGCCCAGTACATGACCTTACGGGACT |
| | | TTCCTACTTGGCAGTACATCTACGTATTAGTCATCGCTATTACCATG |
| | | GTGATGCGGTTTTGGCAGTACACCAATGGGCGTGGATAGCGGTTTGA |
| | | CTCACGGGGATTTCCAAGTCTCCACCCCATTGACGTCAATGGGAGTT |
| | | TGTTTTGGCACCAAAATCAACGGGACTTTCCAAAATGTCGTAATAAC |
| | | CCCGCCCCGTTGACGCAAATGGGCGGTAGGCGTGTACGGTGGGAGGT |
| | | CTATATAAGCAGAGGTCGTTTAGTGAACCGTCAGATCACTAGTAGCT |
| | | TTATTGCGGTAGTTTATCACAGTTAAATTGCTAACGCAGTCAGTGCT |
| | | CGACTGATCACAGGTAAGTATCAAGGTTACAAGACAGGTTTAAGGAG |
| | | GCCAATAGAAACTGGGCTTGTCGAGACAGAGAAGATTCTTGCGTTTC |
| | | TGATAGGCACCTATTGGTCTTACTGACATCCACTTTGCCTTTCTCTC |
| | | CACAGGG |
| JET | 82 | GAATTCGGGCGGAGTTAGGGCGGAGCCAATCAGCGTGCGCCGTTCCG |
| | | AAAGTTGCCTTTTATGGCTGGGCGGAGAATGGGCGGTGAACGCCGAT |
| | | GATTATATAAGGACGCGCCGGGTGTGGCACAGCTAGTTCCGTCGCAG |
| | | CCGGGATTTGGGTCGCGGTTCTTGTTTGTGGATCCCTGTGATCGTCA |
| | | CTTGACA |
| CAG | 83 | ATCTCGACTAGTTATTAATAGTAATCAATTACGGGGTCATTAGTTCA |
| | | TAGCCCATATATGGAGTTCCGCGTTACATAACTTACGGTAAATGGCC |
| | | CGCCTGGCTGACCGCCCAACGACCCCCGCCCATTGACGTCAATAATG |
| | | ACGTATGTTCCCATAGTAACGCCAATAGGGACTTTCCATTGACGTCA |
| | | ATGGGTGGAGTATTTACGGTAAACTGCCCACTTGGCAGTACATCAAG |
| | | TGTATCATATGCCAAGTACGCCCCCTATTGACGTCAATGACGGTAAA |
| | | TGGCCCGCCTGGCATTATGCCCAGTACATGACCTTATGGGACTTTCC |
| | | TACTTGGCAGTACATCTACGTATTAGTCATCGCTATTACCATGGTCG |
| | | AGGTGAGCCCCACGTTCTGCTTCACTCTCCCCATCTCCCCCCCCTCC |
| | | CCACCCCCAATTTTGTATTTATTTATTTTTTAATTATTTTGTGCAGC |
| | | GATGGGGGCGGGGGGGGGGGGGGGGCGCGCGCCAGGCGGGGCGGGGC |
| | | GGGGCGAGGGGCGGGGCGGGGCGAGGCGGAGAGGTGCGGCGGCAGCC |
| | | AATCAGAGCGGCGCGCTCCGAAAGTTTCCTTTTATGGCGAGGCGGCG |
| | | GCGGCGGCGGCCCTATAAAAAGCGAAGCGCGCGGCGGGGGGGGAGTC |
| | | GCTGCGACGCTGCCTTCGCCCCGTGCCCCGCTCCGCCGCCGCCTCGC |
| | | GCCGCCCGCCCCGGCTCTGACTGACCGCGTTACTCCCACAGGTGAGC |
| | | GGGCGGGACGGCCCTTCTCCTCCGGGCTGTAATTAGCGCTTGGTTTA |
| | | ATGACGGCTTGTTTCTTTTCTGTGGCTGCGTGAAAGCCTTGAGGGGC |
| | | TCCGGGAGGGCCCTTTGTGCGGGGGGAGCGGCTCGGGGGGTGCGTGC |
| | | GTGTGTGTGTGCGTGGGGAGCGCCGCGTGCGGCTCCGCGCTGCCCGG |
| | | CGGCTGTGAGCGCTGCGGGCGCGGCGCGGGGCTTTGTGCGCTCCGCA |
| | | GTGTGCGCGAGGGGAGCGCGGCCGGGGGCGGTGCCCCGCGGTGCGGG |
| | | GGGGGCTGCGAGGGGAACAAAGGCTGCGTGCGGGGTGTGTGCGTGGG |
| | | GGGGTGAGCAGGGGGTGTGGGCGCGTCGGTCGGGCTGCAACCCCCCC |
| | | TGCACCCCCCTCCCCGAGTTGCTGAGCACGGCCCGGCTTCGGGTGCG |
| | | GGGCTCCGTACGGGGCGTGGCGCGGGGCTCGCCGTGCCGGGCGGGGG |
| | | GTGGCGGCAGGTGGGGGTGCCGGGGGGGGCGGGGCCGCCTCGGGCCG |
| | | GGGAGGGCTCGGGGGAGGGGCGCGGCGGCCCCCGGAGCGCCGGCGGC |
| | | TGTCGAGGCGCGGCGAGCCGCAGCCATTGCCTTTTATGGTAATCGTG |
| | | CGAGAGGGCGCAGGGACTTCCTTTGTCCCAAATCTGTGCGGAGCCGA |
| | | AATCTGGGAGGCGCCGCCGCACCCCCTCTAGCGGGCGCGGGGCGAAG |
| | | CGGTGCGGCGCCGGCAGGAAGGAAATGGGGGGGGAGGGCCTTCGTGC |
| | | GTCGCCGCGCCGCCGTCCCCTTCTCCCTCTCCAGCCTCGGGGCTGTC |
| | | CGCGGGGGGACGGCTGCCTTCGGGGGGGACGGGGCAGGGGGGGGTTC |
| | | GGCTTCTGGCGTGTGACCGGCGGCTCTAGAGCCTCTGCTAACCATGT |
| | | TCATGCCTTCTTCTTTTTCCTACAGCTCCTGGGCAACGTGCTGGTTA |
| | | TTGTGCTGTCTCATCATTTTGGCAAAGAATT |
| PGK | 84 | GGGGTTGGGGTTGCGCCTTTTCCAAGGCAGCCCTGGGTTTGCGCAGG |
| | | GACGCGGCTGCTCTGGGCGTGGTTCCGGGAAACGCAGCGGCGCCGAC |
| | | CCTGGGTCTCGCACATTCTTCACGTCCGTTCGCAGCGTCACCCGGAT |
| | | CTTCGCCGCTACCCTTGTGGGCCCCCCGGCGACGCTTCCTGCTCCGC |
| | | CCCTAAGTCGGGAAGGTTCCTTGCGGTTCGCGGCGTGCCGGACGTGA |
| | | CAAACGGAAGCCGCACGTCTCACTAGTACCCTCGCAGACGGACAGCG |
| | | CCAGGGAGCAATGGCAGCGCGCCGACCGCGATGGGCTGTGGCCAATA |
| | | GCGGCTGCTCAGCAGGGCGCGCCGAGAGCAGCGGCCGGGAAGGGGCG |
| | | GTGCGGGAGGCGGGGTGTGGGGCGGTAGTGTGGGCCCTGTTCCTGCC |
| | | CGCGCGGTGTTCCGCATTCTGCAAGCCTCCGGAGCGCACGTCGGCAG |
| | | TCGGCTCCCTCGTTGACCGAATCACCGACCTCTCTCCCCAG |
| EF-1a | 85 | GAATTCAGGCTCCGGTGCCCGTCAGTGGGCAGAGCGCACATCGCCCA |
| | | CAGTCCCCGAGAAGTTGGGGGGAGGGGTCGGCAATTGAACCGGTGCC |
| | | TAGAGAAGGTGGCGCGGGGTAAACTGGGAAAGTGATGTCGTGTACTG |
| | | GCTCCGCCTTTTTCCCGAGGGTGGGGGAGAACCGTATATAAGTGCAG |
| | | TAGTCGCCGTGAACGTTCTTTTTCGCAACGGGTTTGCCGCCAGAACA |
| | | CAGGTAAGTGCCGTGTGTGGTTCCCGCGGGCCTGGCCTCTTTACGGG |
| | | TTATGGCCCTTGCGTGCCTTGAATTACTTCCACCTGGCTGCAGTACG |
| | | TGATTCTTGATCCCGAGCTTCGGGTTGGAAGTGGGTGGGAGAGTTCG |
| | | AGGCCTTGCGCTTAAGGAGCCCCTTCGCCTCGTGCTTGAGTTGAGGC |
| | | CTGGCCTGGGCGCTGGGGCCGCCGCGTGCGAATCTGGTGGCACCTTC |
| | | GCGCCTGTCTCGCTGCTTTCGATAAGTCTCTAGCCATTTAAAATTTT |
| | | TGATGACCTGCTGCGACGCTTTTTTTCTGGCAAGATAGTCTTGTAAA |
| | | TGCGGGCCAAGATCTGCACACTGGTATTTCGGTTTTTGGGGCCGCGG |
| | | GCGGCGACGGGGCCCGTGCGTCCCAGCGCACATGTTCGGCGAGGCGG |
| | | GGCCTGCGAGCGCGGCCACCGAGAATCGGACGGGGGTAGTCTCAAGC |
| | | TGGCCGGCCTGCTCTGGTGCCTGGTCTCGCGCCGCCGTGTATCGCCC |
| | | CGCCCTGGGCGGCAAGGCTGGCCCGGTCGGCACCAGTTGCGTGAGCG |
| | | GAAAGATGGCCGCTTCCCGGCCCTGCTGCAGGGAGCTCAAAATGGAG |
| | | GACGCGGCGCTCGGGAGAGCGGGCGGGTGAGTCACCCACACAAAGGA |
| | | AAAGGGCCTTTCCGTCCTCAGCCGTCGCTTCATGTGACTCCACGGAG |
| | | TACCGGGCGCCGTCCAGGCACCTCGATTAGTTCTCGAGCTTTTGGAG |
| | | TACGTCGTCTTTAGGTTGGGGGGAGGGGTTTTATGCGATGGAGTTTC |
| | | CCCACACTGAGTGGGTGGAGACTGAAGTTAGGCCAGCTTGGCACTTG |
| | | ATGTAATTCTCCTTGGAATTTGCCCTTTTTGAGTTTGGATCTTGGTT |
| | | CATTCTCAAGCCTCAGACAGTGGTTCAAAGTTTTTTTCTTCCATTTC |
| | | AGGTGTCGTGACATCATTTT |

D. Efficiency and specificity

[0246] An engineered, non-naturally occurring system can be evaluated in terms of efficiency and/or specificity in nucleic acid targeting, cleavage, or modification.

[0247] In certain embodiments, an engineered, non-naturally occurring system has high efficiency. For example, in certain embodiments, at least 1%, at least 1.5%, at least 2%, at least 2.5%, at least 3%, at least 4%, at least 5%, at least 10%, at least 15%, at least 20%, at least 25%, at least 30%, at least 35%, at least 40%, at least 45%, at least 50%, at least 55%, at least 60%, at least 65%, at least 70%, at least 75%, at least 80%, at least 85%, at least 90%, at least 95%, at least 96%, at least 97%, at least 98%, or at least 99% of a population of nucleic acids having the target nucleotide sequence and a cognate PAM, when contacted with the engineered, non-naturally occurring system, is targeted, cleaved, or modified. In certain embodiments, the genomes of at least 5%, at least 10%, at least 15%, at least 20%, at least 25%, at least 30%, at least 35%, at least 40%, at least 45%, at least 50%, at least 55%, at least 60%, at least 65%, at least 70%, at least 75%, at least 80%, at least 85%, at least 90%, at least 95%, at least 96%, at least 97%, at least 98%, or at least 99% of a population of cells, when the engineered, non-naturally occurring system is delivered into the cells, are targeted, cleaved, or modified.

[0248] It has been observed that for a given spacer sequence, the occurrence of on-target events and the occurrence of off-target events are generally correlated. For certain therapeutic purposes, lower on-target efficiency can be tolerated and low off-target frequency is more desirable. For example, when editing or modifying a proliferating cell that will be delivered to a subject and proliferate in vivo, tolerance to off-target events is low. Prior to delivery, it is possible to assess the on-target and off-target events, thereby selecting one or more colonies that have the desired edit or modification and lack any undesired edit or modification. Notwithstanding, the on-target efficiency may need to meet a certain standard to be suitable for therapeutic use. High editing efficiency in a standard CRISPR-Cas system allows tuning of the system, for example, by reducing the binding of the guide nucleic acids to the Cas protein, without losing therapeutic applicability.

[0249] In certain embodiments, when a population of nucleic acids having the target nucleotide sequence and a cognate PAM is contacted with the engineered, non-naturally occurring system disclosed herein, the frequency of off-target events (e.g., targeting, cleavage, or modification, depending on the function of the CRISPR-Cas system) is reduced. Methods of assessing off-target events were summarized in Lazzarotto et al. (2018) Nat Protoc. 13 (11): 2615-42, and include discovery of in situ Cas off-targets and verification by sequencing (DISCOVER-seq) as disclosed in Wienert et al. (2019) Science 364 (6437): 286-89: genome-wide unbiased identification of double-stranded breaks (DSBs) enabled by sequencing (GUIDE-seq) as disclosed in Kleinstiver et al. (2016) Nat. Biotech. 34:869-74; circularization for in vitro reporting of cleavage effects by sequencing (CIRCLE-seq) as described in Kocak et al. (2019) Nat. Biotech. 37:657-66. In certain embodiments, the off-target events include targeting, cleavage, or modification at a given off-target locus (e.g., the locus with the highest occurrence of off-target events detected). In certain embodiments, the off-target events include targeting, cleavage, or modification at all the loci with detectable off-target events, collectively.

[0250] In certain embodiments, genomic mutations are detected in no more than 0.0001%, 0.0002%, 0.0003%, 0.0004%, 0.0005%, 0.0006%, 0.0007%, 0.0008%, 0.0009%, 0.001%, 0.002%, 0.003%, 0.004%, 0.005%, 0.006%, 0.007%, 0.008%, 0.009%, 0.01%, 0.02%, 0.03%, 0.04%, 0.05%, 0.06%, 0.07%, 0.08%, 0.09%, 0.1%, 0.2%, 0.3%, 0.4%, 0.5%, 0.6%, 0.7%, 0.8%, 0.9%, 1%, 2%, 3%, 4%, or 5% of the cells at any off-target loci (in aggregate). In certain embodiments, the ratio of the percentage of cells having an on-target event to the percentage of cells having any off-target event (e.g., the ratio of the percentage of cells having an on-target editing event to the percentage of cells having a mutation at any off-target loci) is at least 10, 20, 30, 40, 50, 60, 70, 80, 90, 100, 200, 300, 400, 500, 600, 700, 800, 900, 1000, 2000, 3000, 4000, 5000, 6000, 7000, 8000, 9000, or 10000. It is understood that genetic variation may be present in a population of cells, for example, by spontaneous mutations, and such mutations are not included as off-target events.

### Multiplexing

[0251] The method of targeting, editing, and/or modifying a genomic DNA disclosed herein can be conducted in multiplicity. For example, a library of targeter nucleic acids can be used to target multiple genomic loci: a library of donor templates can also be used to generate multiple insertions, deletions, and/or substitutions. The multiplex assay can be conducted in a screening method wherein each separate cell culture (e.g., in a well of a 96-well plate or a 384-well plate) is exposed to a different guide nucleic acid having a different targeter stem sequence and/or a different donor template. The multiplex assay can also be conducted in a selection method wherein a cell culture is exposed to a mixed population of different guide nucleic acids and/or donor templates, and the cells with desired characteristics (e.g., functionality) are enriched or selected by advantageous survival or growth, resistance to a certain agent, expression of a detectable protein (e.g., a fluorescent protein that is detectable by flow cytometry), etc.

[0252] In certain embodiments, the plurality of guide nucleic acids and/or the plurality of donor templates are designed for saturation editing. For example, in certain embodiments, each nucleotide position in a sequence of interest is systematically modified with each of all four traditional bases, A, T, G and C. In other embodiments, at least one sequence in each gene from a pool of genes of interest is modified, for example, according to a CRISPR design algorithm. In certain embodiments, each sequence from a pool of exogenous elements of interest (e.g., protein coding sequences, non-protein coding genes, regulatory elements) is inserted into one or more given loci of the genome.

[0253] It is understood that the multiplex methods suitable for the purpose of carrying out a screening or selection method, which is typically conducted for research purposes, may be different from the methods suitable for therapeutic purposes. For example, constitutive expression of certain elements (e.g., a Cas nuclease and/or a guide nucleic acid) may be undesirable for therapeutic purposes due to the potential of increased off-targeting. Conversely, for research purposes, constitutive expression of a Cas nuclease and/or a guide nucleic acid may be desirable. For example, the constitutive expression provides a large window during which other elements can be introduced. When a stable cell line is established for the constitutive expression, the number of exogenous elements that need to be co-delivered into a single cell is also reduced. Therefore, constitutive expression of certain elements can increase the efficiency and reduce the complexity of a screening or selection process. Inducible expression of certain elements of the system disclosed herein may also be used for research purposes given similar advantages. Expression may be induced by an exogenous agent (e.g., a small molecule) or by an endogenous molecule or complex present in a particular cell type (e.g., at a particular stage of differentiation). Methods known in the art, such as those described herein, can be used for constitutively or inducibly expressing one or more elements. For example, the specificity of CRISPR nucleases is at least partially dictated by the uniqueness of the spacer (in combination with spacer sequence's proximity to a requisite PAM) and its off-target score can be calculated with algorithms, such as crispr.mit.edu (Hsu et al. (2013) Nat. Biotech. 31:827-832). The highest possible score is 100, which shows probability for high specificity and few off targets. Because our SHS library targets intergenic regions, the algorithm for gRNA prediction should be able to make alignments with repeated regions and low-complexity sequences.

[0254] It is further understood that despite the need to introduce multiple elements—the single guide nucleic acid and the Cas protein: or the targeter nucleic acid, the modulator nucleic acid, and the Cas protein—these elements can be delivered into the cell as a single complex of pre-formed RNP. Therefore, the efficiency of the screening or selection process can also be achieved by pre-assembling a plurality of RNP complexes in a multiplex manner.

[0255] In certain embodiments, the method disclosed herein further comprises a step of identifying a guide nucleic acid, a Cas protein, a donor template, or a combination of two or more of these elements from the screening or selection process. A set of barcodes may be used, for example, in the donor template between two homology arms, to facilitate the identification. In specific embodiments, the method further comprises harvesting the population of cells; selectively amplifying a genomic DNA or RNA sample including the target nucleotide sequence(s) and/or the barcodes; and/or sequencing the genomic DNA or RNA sample and/or the barcodes that has been selectively amplified.

[0256] In addition, the present invention provides a library comprising a plurality of guide nucleic acids, such as a plurality of guide nucleic acids disclosed herein. In another aspect, the present invention provides a library comprising a plurality of nucleic acids each comprising a regulatory element operably linked to a different guide nucleic acid such as a different guide nucleic acid disclosed herein. These libraries can be used in combination with one or more Cas proteins or Cas-coding nucleic acids, such as disclosed herein, and/or one or more donor templates, such as disclosed herein, for a screening or selection method.

### E. Genes to be Modified

[0257] The gene to be targeted in a genome can be any suitable gene. A spacer sequence for use in a gRNA system that also includes one or more of the ssODN compositions provided herein can thus be capable of hybridizing with any suitable gene. Non-limiting examples of genes include human ADORA2A, ALPNR, B2M, BBS1, CALR, CARD11, CD3G, CD52, CD58, CD247, CIITA, COL17A1, CSF1R, CTLA4, DCK, DEFB134, DHODH, ERAP1, ERAP2, FAS, mir-101-2, HAVCR2 (also called TIM3), IFNGR1, IFNGR2, IL7R, JAK1, JAK2, LAG3, LCK, LCK1, MLANA, MVD, PDCD1 (also called PD-1), PLCG1, PLK1, PSMB5, PSMB8, PSMB9, PTCD2, PTPNI, PTPN6, PTPN11, RFX5, RFXAP, RPL23, RXANK, SOX10, SRP54, STAT1, Tap1, TAP2, TAPBP, TGFBR2, TIGIT, TIM3, TRAC, TRBC1, TRBC1+2, TRBC2, TUBB, TWF1, U6. Further non-limiting examples include CSF2, CD40LG, CD3E, and CD38.

[0258] In certain embodiments of the engineered, non-naturally occurring system, the spacer sequence comprises a nucleotide sequence selected from the group consisting of SEQ ID NOs: 983, 1024-1030, and 1084-1105, wherein the spacer sequence is capable of hybridizing with the human ADORA2A gene. In certain embodiments, when the system is delivered into a population of human cells ex vivo, the genomic sequence at the ADORA2A gene locus is edited in at least 1.5% of the cells.

[0259] In certain embodiments of the engineered, non-naturally occurring system, the spacer sequence comprises a nucleotide sequence selected from the group consisting of SEQ ID NOs: 1549-1558, wherein the spacer sequence is capable of hybridizing with the human APLNR gene. In certain embodiments, when the system is delivered into a population of human cells ex vivo, the genomic sequence at the APLNR gene locus is edited in at least 1.5% of the cells.

[0260] In certain embodiments of the engineered, non-naturally occurring system, the spacer sequence comprises a nucleotide sequence selected from the group consisting of SEQ ID NOs: 984, 989-991, 1031-1038, 1106-1115, and 1285-1302, wherein the spacer sequence is capable of hybridizing with the human B2M gene. In certain embodiments, when the system is delivered into a population of human cells ex vivo, the genomic sequence at the B2M gene locus is edited in at least 1.5% of the cells.

[0261] In certain embodiments of the engineered, non-naturally occurring system, the spacer sequence comprises a nucleotide sequence selected from the group consisting of SEQ ID NOs: 1559-1568, wherein the spacer sequence is capable of hybridizing with the human BBSI gene. In certain embodiments, when the system is delivered into a population of human cells ex vivo, the genomic sequence at the BBS1 gene locus is edited in at least 1.5% of the cells.

[0262] In certain embodiments of the engineered, non-naturally occurring system, the spacer sequence comprises a nucleotide sequence selected from the group consisting of SEQ ID NOs: 1539-1548, wherein the spacer sequence is capable of hybridizing with the human CALR gene. In certain embodiments, when the system is delivered into a population of human cells ex vivo, the genomic sequence at the CALR gene locus is edited in at least 1.5% of the cells.

[0263] In certain embodiments of the engineered, non-naturally occurring system, the spacer sequence comprises a nucleotide sequence selected from the group consisting of SEQ ID NOs: 1388-1390, wherein the spacer sequence is capable of hybridizing with the human CARD11 gene. In certain embodiments, when the system is delivered into a population of human cells ex vivo, the genomic sequence at the CARD11 gene locus is edited in at least 1.5% of the cells.

[0264] In certain embodiments of the engineered, non-naturally occurring system, the spacer sequence comprises a nucleotide sequence selected from the group consisting of SEQ ID NOs: 86-111 and 1528, wherein the spacer sequence is capable of hybridizing with the human CD247 gene. In certain embodiments, when the system is delivered into a population of human cells ex vivo, the genomic sequence at the CD247 gene locus is edited in at least 1.5% of the cells.

[0265] In certain embodiments of the engineered, non-naturally occurring system, the spacer sequence comprises a nucleotide sequence selected from the group consisting of SEQ ID NOs: 1729-1765, wherein the spacer sequence is capable of hybridizing with the human CD38 gene. In certain embodiments, when the system is delivered into a population of human cells ex vivo, the genomic sequence at the CD38 gene locus is edited in at least 1.5% of the cells.

[0266] In certain embodiments of the engineered, non-naturally occurring system, the spacer sequence comprises a nucleotide sequence selected from the group consisting of SEQ ID NOs: 1795-1796, wherein the spacer sequence is capable of hybridizing with the human CD3E gene. In certain embodiments, when the system is delivered into a population of human cells ex vivo, the genomic sequence at the CD3E gene locus is edited in at least 1.5% of the cells.

[0267] In certain embodiments of the engineered, non-naturally occurring system, the spacer sequence comprises a nucleotide sequence selected from the group consisting of SEQ ID NOs: 1518-1527, wherein the spacer sequence is capable of hybridizing with the human CD3G gene. In certain embodiments, when the system is delivered into a population of human cells ex vivo, the genomic sequence at the CD3G gene locus is edited in at least 1.5% of the cells.

[0268] In certain embodiments of the engineered, non-naturally occurring system, the spacer sequence comprises a nucleotide sequence selected from the group consisting of SEQ ID NOs: 1798, wherein the spacer sequence is capable of hybridizing with the human CD40LG gene. In certain embodiments, when the system is delivered into a population of human cells ex vivo, the genomic sequence at the CD40LG gene locus is edited in at least 1.5% of the cells.

[0269] In certain embodiments of the engineered, non-naturally occurring system, the spacer sequence comprises a nucleotide sequence selected from the group consisting of SEQ ID NOs: 985, 1039, 1116-1121, and 1466-1467, wherein the spacer sequence is capable of hybridizing with the human CD52 gene. In certain embodiments, when the system is delivered into a population of human cells ex vivo, the genomic sequence at the CD52 gene locus is edited in at least 1.5% of the cells.

[0270] In certain embodiments of the engineered, non-naturally occurring system, the spacer sequence comprises a nucleotide sequence selected from the group consisting of SEQ ID NOs: 1569-1578, wherein the spacer sequence is capable of hybridizing with the human CD58 gene. In certain embodiments, when the system is delivered into a population of human cells ex vivo, the genomic sequence at the CD58 gene locus is edited in at least 1.5% of the cells.

[0271] In certain embodiments of the engineered, non-naturally occurring system, the spacer sequence comprises a nucleotide sequence selected from the group consisting of SEQ ID NOs: 986, 1040-1041, 1122-1149, and 1303-1371, wherein the spacer sequence is capable of hybridizing with the human CIITA gene. In certain embodiments, when the system is delivered into a population of human cells ex vivo, the genomic sequence at the CIITA gene locus is edited in at least 1.5% of the cells.

[0272] In certain embodiments of the engineered, non-naturally occurring system, the spacer sequence comprises a nucleotide sequence selected from the group consisting of SEQ ID NOs: 1579-1588, wherein the spacer sequence is capable of hybridizing with the human COL17A1 gene. In certain embodiments, when the system is delivered into a population of human cells ex vivo, the genomic sequence at the COL 17Al gene locus is edited in at least 1.5% of the cells.

[0273] In certain embodiments of the engineered, non-naturally occurring system, the spacer sequence comprises a nucleotide sequence selected from the group consisting of SEQ ID NOs: 1792-1793, wherein the spacer sequence is capable of hybridizing with the human CSF1R gene. In certain embodiments, when the system is delivered into a population of human cells ex vivo, the genomic sequence at the CSF1R gene locus is edited in at least 1.5% of the cells.

[0274] In certain embodiments of the engineered, non-naturally occurring system, the spacer sequence comprises a nucleotide sequence selected from the group consisting of SEQ ID NOs: 1797, wherein the spacer sequence is capable of hybridizing with the human CSF2 gene. In certain embodiments, when the system is delivered into a population of human cells ex vivo, the genomic sequence at the CSF2 gene locus is edited in at least 1.5% of the cells.

[0275] In certain embodiments of the engineered, non-naturally occurring system, the spacer sequence comprises a nucleotide sequence selected from the group consisting of SEQ ID NOs: 112-152, wherein the spacer sequence is capable of hybridizing with the human CTLA4 gene. In certain embodiments, when the system is delivered into a population of human cells ex vivo, the genomic sequence at the CTLA4 gene locus is edited in at least 1.5% of the cells.

[0276] In certain embodiments of the engineered, non-naturally occurring system, the spacer sequence comprises a nucleotide sequence selected from the group consisting of SEQ ID NOs: 992-995, 1042-1045, 1150-1171, and 1433, wherein the spacer sequence is capable of hybridizing with the human DCK gene. In certain embodiments, when the system is delivered into a population of human cells ex vivo, the genomic sequence at the DCK gene locus is edited in at least 1.5% of the cells.

[0277] In certain embodiments of the engineered, non-naturally occurring system, the spacer sequence comprises a nucleotide sequence selected from the group consisting of SEQ ID NOs: 1589-1598, wherein the spacer sequence is capable of hybridizing with the human DEFB134 gene. In certain embodiments, when the system is delivered into a population of human cells ex vivo, the genomic sequence at the DEFB134 gene locus is edited in at least 1.5% of the cells.

[0278] In certain embodiments of the engineered, non-naturally occurring system, the spacer sequence comprises a nucleotide sequence selected from the group consisting of SEQ ID NOs: 1414-1416, wherein the spacer sequence is capable of hybridizing with the human DHODH gene. In certain embodiments, when the system is delivered into a population of human cells ex vivo, the genomic sequence at the DHODH gene locus is edited in at least 1.5% of the cells.

[0279] In certain embodiments of the engineered, non-naturally occurring system, the spacer sequence comprises a nucleotide sequence selected from the group consisting of SEQ ID NOs: 1659-1668, wherein the spacer sequence is capable of hybridizing with the human ERAPI gene. In certain embodiments, when the system is delivered into a population of human cells ex vivo, the genomic sequence at the ERAP1 gene locus is edited in at least 1.5% of the cells.

[0280] In certain embodiments of the engineered, non-naturally occurring system, the spacer sequence comprises a nucleotide sequence selected from the group consisting of SEQ ID NOs: 1669-1678, wherein the spacer sequence is capable of hybridizing with the human ERAP2 gene. In certain embodiments, when the system is delivered into a population of human cells ex vivo, the genomic sequence at the ERAP2 gene locus is edited in at least 1.5% of the cells.

[0281] In certain embodiments of the engineered, non-naturally occurring system, the spacer sequence comprises a nucleotide sequence selected from the group consisting of SEQ ID NOs: 996-1000, 1046-1059, 1172-1243, and 1781-1791, wherein the spacer sequence is capable of hybridizing with the human FAS gene. In certain embodiments, when the system is delivered into a population of human cells ex vivo, the genomic sequence at the FAS gene locus is edited in at least 1.5% of the cells.

[0282] In certain embodiments of the engineered, non-naturally occurring system, the spacer sequence comprises a nucleotide sequence selected from the group consisting of SEQ ID NOs: 1619-1621, wherein the spacer sequence is capable of hybridizing with the human mir-101-2 gene. In certain embodiments, when the system is delivered into a population of human cells ex vivo, the genomic sequence at the mir-101-2 gene locus is edited in at least 1.5% of the cells.

[0283] In certain embodiments of the engineered, non-naturally occurring system, the spacer sequence comprises a nucleotide sequence selected from the group consisting of SEQ ID NOs: 333-383 and 1244, wherein the spacer sequence is capable of hybridizing with the human HAVCR2 (TIM3) gene. In certain embodiments, when the system is delivered into a population of human cells ex vivo, the genomic sequence at the HAVCR2 (TIM3) gene locus is edited in at least 1.5% of the cells.

[0284] In certain embodiments of the engineered, non-naturally occurring system, the spacer sequence comprises a nucleotide sequence selected from the group consisting of SEQ ID NOs: 1679-1688, wherein the spacer sequence is capable of hybridizing with the human IFNGR1 gene. In certain embodiments, when the system is delivered into a population of human cells ex vivo, the genomic sequence at the IFNGR1 gene locus is edited in at least 1.5% of the cells.

[0285] In certain embodiments of the engineered, non-naturally occurring system, the spacer sequence comprises a nucleotide sequence selected from the group consisting of SEQ ID NOs: 1689-1698, wherein the spacer sequence is capable of hybridizing with the human IFNGR2 gene. In certain embodiments, when the system is delivered into a population of human cells ex vivo, the genomic sequence at the IFNGR2 gene locus is edited in at least 1.5% of the cells.

[0286] In certain embodiments of the engineered, non-naturally occurring system, the spacer sequence comprises a nucleotide sequence selected from the group consisting of SEQ ID NOs: 1391-1398, wherein the spacer sequence is capable of hybridizing with the human IL7R gene. In certain embodiments, when the system is delivered into a population of human cells ex vivo, the genomic sequence at the IL7R gene locus is edited in at least 1.5% of the cells.

[0287] In certain embodiments of the engineered, non-naturally occurring system, the spacer sequence comprises a nucleotide sequence selected from the group consisting of SEQ ID NOs: 1699-1718, wherein the spacer sequence is capable of hybridizing with the human JAKI gene. In certain embodiments, when the system is delivered into a population of human cells ex vivo, the genomic sequence at the JAKI gene locus is edited in at least 1.5% of the cells.

[0288] In certain embodiments of the engineered, non-naturally occurring system, the spacer sequence comprises a nucleotide sequence selected from the group consisting of SEQ ID NOs: 154-208, and 1245, wherein the spacer sequence is capable of hybridizing with the human LAG3 gene. In certain embodiments, when the system is delivered into a population of human cells ex vivo, the genomic sequence at the LAG3 gene locus is edited in at least 1.5% of the cells.

[0289] In certain embodiments of the engineered, non-naturally occurring system, the spacer sequence comprises a nucleotide sequence selected from the group consisting of SEQ ID NOs: 1399-1401, wherein the spacer sequence is capable of hybridizing with the human LCK1 gene. In certain embodiments, when the system is delivered into a population of human cells ex vivo, the genomic sequence at the LCK1 gene locus is edited in at least 1.5% of the cells.

[0290] In certain embodiments of the engineered, non-naturally occurring system, the spacer sequence comprises a nucleotide sequence selected from the group consisting of SEQ ID NOs: 1609-1618, wherein the spacer sequence is capable of hybridizing with the human MLANA gene. In certain embodiments, when the system is delivered into a population of human cells ex vivo, the genomic sequence at the MLANA gene locus is edited in at least 1.5% of the cells.

[0291] In certain embodiments of the engineered, non-naturally occurring system, the spacer sequence comprises a nucleotide sequence selected from the group consisting of SEQ ID NOs: 1427-1429, wherein the spacer sequence is capable of hybridizing with the human MVD gene. In certain embodiments, when the system is delivered into a population of human cells ex vivo, the genomic sequence at the MVD gene locus is edited in at least 1.5% of the cells.

[0292] In certain embodiments of the engineered, non-naturally occurring system, the spacer sequence comprises a nucleotide sequence selected from the group consisting of SEQ ID NOs: 209-238, wherein the spacer sequence is capable of hybridizing with the human PDCD1 (PD) gene. In certain embodiments, when the system is delivered into a population of human cells ex vivo, the genomic sequence at the PDCD1 (PD) gene locus is edited in at least 1.5% of the cells.

[0293] In certain embodiments of the engineered, non-naturally occurring system, the spacer sequence comprises a nucleotide sequence selected from the group consisting of SEQ ID NOs: 1402-1406, wherein the spacer sequence is capable of hybridizing with the human PLCG1 gene. In certain embodiments, when the system is delivered into a population of human cells ex vivo, the genomic sequence at the PLCG1 gene locus is edited in at least 1.5% of the cells.

[0294] In certain embodiments of the engineered, non-naturally occurring system, the spacer sequence comprises a nucleotide sequence selected from the group consisting of SEQ ID NOs: 1417-1426, wherein the spacer sequence is capable of hybridizing with the human PLK1 gene. In certain embodiments, when the system is delivered into a population of human cells ex vivo, the genomic sequence at the PLK1 gene locus is edited in at least 1.5% of the cells.

[0295] In certain embodiments of the engineered, non-naturally occurring system, the spacer sequence comprises a nucleotide sequence selected from the group consisting of SEQ ID NOs: 1529-1538, wherein the spacer sequence is capable of hybridizing with the human PSMB5 gene. In certain embodiments, when the system is delivered into a population of human cells ex vivo, the genomic sequence at the PSMB5 gene locus is edited in at least 1.5% of the cells.

[0296] In certain embodiments of the engineered, non-naturally occurring system, the spacer sequence comprises a nucleotide sequence selected from the group consisting of SEQ ID NOs: 1478-1487, wherein the spacer sequence is capable of hybridizing with the human PSMB8 gene. In certain embodiments, when the system is delivered into a population of human cells ex vivo, the genomic sequence at the PSMB8 gene locus is edited in at least 1.5% of the cells.

[0297] In certain embodiments of the engineered, non-naturally occurring system, the spacer sequence comprises a nucleotide sequence selected from the group consisting of SEQ ID NOs: 1468-1477, wherein the spacer sequence is capable of hybridizing with the human PSMB9 gene. In certain embodiments, when the system is delivered into a population of human cells ex vivo, the genomic sequence at the PSMB98 gene locus is edited in at least 1.5% of the cells.

[0298] In certain embodiments of the engineered, non-naturally occurring system, the spacer sequence comprises a nucleotide sequence selected from the group consisting of SEQ ID NOs: 1638-1647, wherein the spacer sequence is capable of hybridizing with the human PTCD2 gene. In certain embodiments, when the system is delivered into a population of human cells ex vivo, the genomic sequence at the PTCD2 gene locus is edited in at least 1.5% of the cells.

[0299] In certain embodiments of the engineered, non-naturally occurring system, the spacer sequence comprises a nucleotide sequence selected from the group consisting of SEQ ID NOs: 239-241, wherein the spacer sequence is capable of hybridizing with the human PTPNI gene. In certain embodiments, when the system is delivered into a population of human cells ex vivo, the genomic sequence at the PTPNI gene locus is edited in at least 1.5% of the cells.

[0300] In certain embodiments of the engineered, non-naturally occurring system, the spacer sequence comprises a nucleotide sequence selected from the group consisting of SEQ ID NOs: 242-248 wherein the spacer sequence is capable of hybridizing with the human PTPN11 gene. In certain embodiments, when the system is delivered into a population of human cells ex vivo, the genomic sequence at the PTPN11 gene locus is edited in at least 1.5% of the cells.

[0301] In certain embodiments of the engineered, non-naturally occurring system, the spacer sequence comprises a nucleotide sequence selected from the group consisting of SEQ ID NOs: 249-301 and 1246-1248, wherein the spacer sequence is capable of hybridizing with the human PTPN6 gene. In certain embodiments, when the system is delivered into a population of human cells ex vivo, the genomic sequence at the PTPN6 gene locus is edited in at least 1.5% of the cells.

[0302] In certain embodiments of the engineered, non-naturally occurring system, the spacer sequence comprises a nucleotide sequence selected from the group consisting of SEQ ID NOs: 1488-1497, wherein the spacer sequence is capable of hybridizing with the human RFX5 gene. In certain embodiments, when the system is delivered into a population of human cells ex vivo, the genomic sequence at the RFX5 gene locus is edited in at least 1.5% of the cells.

[0303] In certain embodiments of the engineered, non-naturally occurring system, the spacer sequence comprises a nucleotide sequence selected from the group consisting of SEQ ID NOs: 1498-1507, wherein the spacer sequence is capable of hybridizing with the human RFXAP gene. In certain embodiments, when the system is delivered into a population of human cells ex vivo, the genomic sequence at the RFXAP gene locus is edited in at least 1.5% of the cells.

[0304] In certain embodiments of the engineered, non-naturally occurring system, the spacer sequence comprises a nucleotide sequence selected from the group consisting of SEQ ID NOs: 1628-1637, wherein the spacer sequence is capable of hybridizing with the human RPL23 gene. In certain embodiments, when the system is delivered into a population of human cells ex vivo, the genomic sequence at the RPL23 gene locus is edited in at least 1.5% of the cells.

[0305] In certain embodiments of the engineered, non-naturally occurring system, the spacer sequence comprises a nucleotide sequence selected from the group consisting of SEQ ID NOs: 1508-1517, wherein the spacer sequence is capable of hybridizing with the human RFXANK gene. In certain embodiments, when the system is delivered into a population of human cells ex vivo, the genomic sequence at the RFXANK gene locus is edited in at least 1.5% of the cells.

[0306] In certain embodiments of the engineered, non-naturally occurring system, the spacer sequence comprises a nucleotide sequence selected from the group consisting of SEQ ID NOs: 1622-1627, wherein the spacer sequence is capable of hybridizing with the human SOX10 gene. In certain embodiments, when the system is delivered into a population of human cells ex vivo, the genomic sequence at the SOX10 gene locus is edited in at least 1.5% of the cells.

[0307] In certain embodiments of the engineered, non-naturally occurring system, the spacer sequence comprises a nucleotide sequence selected from the group consisting of SEQ ID NOs: 1648-1658, wherein the spacer sequence is capable of hybridizing with the human SRP54 gene. In certain embodiments, when the system is delivered into a population of human cells ex vivo, the genomic sequence at the SRP54 gene locus is edited in at least 1.5% of the cells.

[0308] In certain embodiments of the engineered, non-naturally occurring system, the spacer sequence comprises a nucleotide sequence selected from the group consisting of SEQ ID NOs: 1719-1728, wherein the spacer sequence is capable of hybridizing with the human STAT1 gene. In certain embodiments, when the system is delivered into a population of human cells ex vivo, the genomic sequence at the STAT1 gene locus is edited in at least 1.5% of the cells.

[0309] In certain embodiments of the engineered, non-naturally occurring system, the spacer sequence comprises a nucleotide sequence selected from the group consisting of SEQ ID NOs: 1436-1445, wherein the spacer sequence is capable of hybridizing with the human TAP1 gene. In certain embodiments, when the system is delivered into a population of human cells ex vivo, the genomic sequence at the TAP1 gene locus is edited in at least 1.5% of the cells.

[0310] In certain embodiments of the engineered, non-naturally occurring system, the spacer sequence comprises a nucleotide sequence selected from the group consisting of SEQ ID NOs: 1446-1455, wherein the spacer sequence is capable of hybridizing with the human TAP2 gene. In certain embodiments, when the system is delivered into a population of human cells ex vivo, the genomic sequence at the TAP2 gene locus is edited in at least 1.5% of the cells.

[0311] In certain embodiments of the engineered, non-naturally occurring system, the spacer sequence comprises a nucleotide sequence selected from the group consisting of SEQ ID NOs: 1456-1465, wherein the spacer sequence is capable of hybridizing with the human TAPBP gene. In certain embodiments, when the system is delivered into a population of human cells ex vivo, the genomic sequence at the TAPBP gene locus is edited in at least 1.5% of the cells.

[0312] In certain embodiments of the engineered, non-naturally occurring system, the spacer sequence comprises a nucleotide sequence selected from the group consisting of SEQ ID NOs: 1766-1780, wherein the spacer sequence is capable of hybridizing with the human TGFBR2 gene. In certain embodiments, when the system is delivered into a population of human cells ex vivo, the genomic sequence at the TGFBR2 gene locus is edited in at least 1.5% of the cells.

[0313] In certain embodiments of the engineered, non-naturally occurring system, the spacer sequence comprises a nucleotide sequence selected from the group consisting of SEQ ID NOs: 302-332, wherein the spacer sequence is capable of hybridizing with the human TIGIT gene. In certain embodiments, when the system is delivered into a population of human cells ex vivo, the genomic sequence at the TIGIT gene locus is edited in at least 1.5% of the cells.

[0314] In certain embodiments of the engineered, non-naturally occurring system, the spacer sequence comprises a nucleotide sequence selected from the group consisting of SEQ ID NOs: 1001-1023, 1060-1083, 1249-1283, and 1434-1435, wherein the spacer sequence is capable of hybridizing with the human TRAC gene. In certain embodiments, when the system is delivered into a population of human cells ex vivo, the genomic sequence at the TRAC gene locus is edited in at least 1.5% of the cells.

[0315] In certain embodiments of the engineered, non-naturally occurring system, the spacer sequence comprises a nucleotide sequence selected from the group consisting of SEQ ID NOs: 1372-1373, wherein the spacer sequence is capable of hybridizing with the human TRBC1+2 gene. In certain embodiments, when the system is delivered into a population of human cells ex vivo, the genomic sequence at the TRBC1+2 gene locus is edited in at least 1.5% of the cells.

[0316] In certain embodiments of the engineered, non-naturally occurring system, the spacer sequence comprises a nucleotide sequence selected from the group consisting of SEQ ID NOs: 1794, wherein the spacer sequence is capable of hybridizing with the human TRBC1 gene. In certain embodiments, when the system is delivered into a population of human cells ex vivo, the genomic sequence at the TRBC1 gene locus is edited in at least 1.5% of the cells.

[0317] In certain embodiments of the engineered, non-naturally occurring system, the spacer sequence comprises a nucleotide sequence selected from the group consisting of SEQ ID NOs: 1374-1387, wherein the spacer sequence is capable of hybridizing with the human TRBC2 gene. In certain embodiments, when the system is delivered into a population of human cells ex vivo, the genomic sequence at the TRBC2 gene locus is edited in at least 1.5% of the cells.

[0318] In certain embodiments of the engineered, non-naturally occurring system, the spacer sequence comprises a nucleotide sequence selected from the group consisting of SEQ ID NOS: 1430-1432, wherein the spacer sequence is capable of hybridizing with the human TUBB gene. In certain embodiments, when the system is delivered into a population of human cells ex vivo, the genomic sequence at the TUBB gene locus is edited in at least 1.5% of the cells.

[0319] In certain embodiments of the engineered, non-naturally occurring system, the spacer sequence comprises a nucleotide sequence selected from the group consisting of SEQ ID NOs: 1599-1608, wherein the spacer sequence is capable of hybridizing with the human TWF1. In certain embodiments, when the system is delivered into a population of human cells ex vivo, the genomic sequence at the TWFI gene locus is edited in at least 1.5% of the cells.

[0320] In certain embodiments of the engineered, non-naturally occurring system, the spacer sequence comprises a nucleotide sequence selected from the group consisting of SEQ ID NOs: 1407-1413, wherein the spacer sequence is capable of hybridizing with the human U6 gene. In certain embodiments, when the system is delivered into a population of human cells ex vivo, the genomic sequence at the U6 gene locus is edited in at least 1.5% of the cells.

[0321] In certain embodiments of the engineered, non-naturally occurring system, genomic mutations are detected in no more than 2% of the cells at any off-target loci by CIRCLE-Seq. In certain embodiments, genomic mutations are detected in no more than 1% of the cells at any off-target loci by CIRCLE-Seq.

[0322] Table 10 shows an exemplary list of the spacer sequences of tested guide nucleic acids. In particular, Table 7 lists the spacer sequences of guide nucleic acids that showed the best editing efficiency for each target gene. Table 8 lists the spacer sequences of guide nucleic acids that showed at least 10% editing efficiency. Table 9 lists the spacer sequences of guide nucleic acids that showed at least 1.5% and lower than 10% editing efficiency.

[0323] In certain embodiments, a guide nucleic acid of the present invention is capable of binding the genomic locus of the corresponding target gene in the human genome. In certain embodiments, a guide nucleic acid of the present invention, alone or in combination with a modulator nucleic acid, is capable of directing a Cas protein to the genomic locus of the corresponding target gene in the human genome. In certain embodiments, a guide nucleic acid of the present invention, alone or in combination with a modulator nucleic acid, is capable of directing a Cas nuclease to the genomic locus of the corresponding target gene in the human genome, thereby resulting in cleavage of the genomic DNA at the genomic locus.

TABLE 5
Spacer sequences

| Target Gene | Name | SEQ ID NO | PAM | Spacer Sequence |
|---|---|---|---|---|
| CD247 | crCD247_1 | 86 | TTTC | ACCGCGGCCATCCTGCAGGCA |
| CD247 | crCD247_2 | 87 | TTTC | TGAGGGAAAGGACAAGATGAA |
| CD247 | crCD247_3 | 88 | TTTG | GGATCCAGCAGGCCAAAGCTC |
| CD247 | crCD247_4 | 89 | TTTC | CTAGCAGAGAAGGAAGAACCC |
| CD247 | crCD247_5 | 90 | TTTC | TGTGTTGCAGTTCAGCAGGAG |
| CD247 | crCD247_6 | 91 | CTTC | CTGAGGGTTCTTCCTTCTCTG |
| CD247 | crCD247_7 | 92 | CTTC | CCGTTGTCTTTCCTAGCAGAG |
| CD247 | crCD247_8 | 93 | TTTC | TGCAGTTCCTGCAGAAGAGGG |
| CD247 | crCD247_9 | 94 | CTTC | TGCAGGAACTGCAGAAAGATA |
| CD247 | crCD247_10 | 95 | TTTC | ATCCCAATCTCACTGTAGGCC |
| CD247 | crCD247_11 | 96 | CTTT | CATCCCAATCTCACTGTAGGC |
| CD247 | crCD247_12 | 97 | TTTT | CTCATTTCACTCCCAAACAAC |
| CD247 | crCD247_13 | 98 | TTTC | TCATTTCACTCCCAAACAACC |
| CD247 | crCD247_14 | 99 | TTTC | ACTCCCAAACAACCAGCGCCG |
| CD247 | crCD247_15 | 100 | CTTA | CGTTATAGAGCTGGTTCTGGC |
| CD247 | crCD247_16 | 101 | TTTG | TTTTCTGATTTGCTTTCACGC |
| CD247 | crCD247_17 | 102 | TTTC | TGATTTGCTTTCACGCCAGGG |
| CD247 | crCD247_18 | 103 | TTTG | CTTTCACGCCAGGGTCTCAGT |
| CD247 | crCD247_19 | 104 | TTTC | ACGCCAGGGTCTCAGTACAGC |
| CD247 | crCD247_20 | 105 | TTTC | CGGAGGGTCTACGGCGAGGCT |
| CD247 | crCD247_21 | 106 | TTTC | TTATCTGTTATAGGAGCTCAA |
| CD247 | crCD247_22 | 107 | CTTA | TCTGTTATAGGAGCTCAATCT |
| CD247 | crCD247_23 | 108 | CTTG | TCCAAAACATCGTACTCCTCT |
| CD247 | crCD247_24 | 109 | TTTC | CCCCCATCTCAGGGTCCCGGC |
| CD247 | crCD247_25 | 110 | TTTG | GACAAGAGACGTGGCCGGGAC |
| CD247 | crCD247_26 | 111 | TTTC | TCTCCCTCTAACGTCTTCCCG |
| CTLA4 | crCTLA4_1 | 112 | TTTG | CCTGGAGATGCATACTCACAC |
| CTLA4 | crCTLA4_2 | 113 | TTTG | CAGAAGACAGGGATGAAGAGA |
| CTLA4 | crCTLA4_3 | 114 | TTTC | CACTGGAGGTGCCCGTGCAGA |
| CTLA4 | crCTLA4_4 | 115 | TTTG | TGTGTGAGTATGCATCTCCAG |
| CTLA4 | crCTLA4_5 | 116 | TTTC | AGCGGCACAAGGCTCAGCTGA |
| CTLA4 | crCTLA4_6 | 117 | CTTG | TGCCGCTGAAATCCAAGGCAA |
| CTLA4 | crCTLA4_7 | 118 | CTTT | TCCATGCTAGCAATGCACGTG |
| CTLA4 | crCTLA4_8 | 119 | TTTT | CCATGCTAGCAATGCACGTGG |
| CTLA4 | crCTLA4_9 | 120 | CTTT | GTGTGTGAGTATGCATCTCCA |
| CTLA4 | crCTLA4_10 | 121 | CTTT | GCCTGGAGATGCATACTCACA |
| CTLA4 | crCTLA4_11 | 122 | CTTC | GGCAGGCTGACAGCCAGGTGA |
| CTLA4 | crCTLA4_12 | 123 | CTTC | AGTCACCTGGCTGTCAGCCTG |
| CTLA4 | crCTLA4_13 | 124 | CTTC | CTAGATGATTCCATCTGCACG |
| CTLA4 | crCTLA4_14 | 125 | CTTG | CCTTGGATTTCAGCGGCACAA |
| CTLA4 | crCTLA4_15 | 126 | CTTG | ATTTCCACTGGAGGTGCCCGT |
| CTLA4 | crCTLA4_16 | 127 | CTTG | GATAGTGAGGTTCACTTGATT |
| CTLA4 | crCTLA4_17 | 128 | CTTG | CAGATGTAGAGTCCCGTGTCC |
| CTLA4 | crCTLA4_18 | 129 | TTTG | CTCACCAATTACATAAATCTG |
| CTLA4 | crCTLA4_19 | 130 | CTTT | GCTCACCAATTACATAAATCT |
| CTLA4 | crCTLA4_20 | 131 | CTTT | GTTTTCTGTTGCAGATCCAGA |
| CTLA4 | crCTLA4_21 | 132 | TTTG | TTTTCTGTTGCAGATCCAGAA |
| CTLA4 | crCTLA4_22 | 133 | TTTT | CTGTTGCAGATCCAGAACCGT |
| CTLA4 | crCTLA4_23 | 134 | CTTC | CTCCTCTGGATCCTTGCAGCA |
| CTLA4 | crCTLA4_24 | 135 | CTTG | CAGCAGTTAGTTCGGGGTTGT |
| CTLA4 | crCTLA4_25 | 136 | CTTG | GATTTCAGCGGCACAAGGCTC |
| CTLA4 | crCTLA4_26 | 137 | TTTT | TTTATAGCTTTCTCCTCACAG |
| CTLA4 | crCTLA4_27 | 138 | CTTT | CTCCTCACAGCTGTTTCTTTG |
| CTLA4 | crCTLA4_28 | 139 | TTTC | TCCTCACAGCTGTTTCTTTGA |
| CTLA4 | crCTLA4_29 | 140 | TTTT | GCTCAAAGAAACAGCTGTGAG |
| CTLA4 | crCTLA4_30 | 141 | TTTC | TTTTTGTGTTTGACAGCTAAA |
| CTLA4 | crCTLA4_31 | 142 | TTTT | TGTGTTTGACAGCTAAAGAAA |
| CTLA4 | crCTLA4_32 | 143 | TTTG | ACAGCTAAAGAAAAGAAGCCC |
| CTLA4 | crCTLA4_33 | 144 | TTTT | CACATAGACCCCTGTTGTAAG |
| CTLA4 | crCTLA4_34 | 145 | TTTT | CACATTCTGGCTCTGTTGGGG |
| CTLA4 | crCTLA4_35 | 146 | CTTT | TCACATTCTGGCTCTGTTGGG |
| CTLA4 | crCTLA4_36 | 147 | TTTC | AGCCTTATTTTATTCCCATCA |
| CTLA4 | crCTLA4_37 | 148 | TTTC | TCAATTGATGGGAATAAAATA |
| CTLA4 | crCTLA4_38 | 149 | TTTT | TTCTTCTCTTCATCCCTGTCT |
| CTLA4 | crCTLA4_39 | 150 | CTTT | GCAGAAGACAGGGATGAAGAG |
| CTLA4 | crCTLA4_40 | 151 | CTTT | GGCTTTTCCATGCTAGCAATG |
| CTLA4 | crCTLA4_41 | 152 | TTTG | GCTTTTCCATGCTAGCAATGC |
| LAG3 | crLAG3_1 | 153 | TTTG | GGGTGCATACCTGTCTGGCTG |
| LAG3 | crLAG3_2 | 154 | TTTG | GGTCACCTGGATCCCTGGGGA |
| LAG3 | crLAG3_3 | 155 | TTTC | TCAGGACCTTGGCTGGAGGCA |
| LAG3 | crLAG3_4 | 156 | TTTC | CCAGCCTTGGCAATGCCAGCT |
| LAG3 | crLAG3_5 | 157 | TTTG | TGAGGTGACTCCAGTATCTGG |
| LAG3 | crLAG3_6 | 158 | CTTG | CTGTTTCTGCAGCCGCTTTGG |
| LAG3 | crLAG3_7 | 159 | CTTG | CACAGTGACTGCCAGCCCCCC |
| LAG3 | crLAG3_8 | 160 | TTTT | GAACTGCTCCTTCAGCCGCCC |
| LAG3 | crLAG3_9 | 161 | CTTC | AGCCGCCCTGACCGCCCAGCC |
| LAG3 | crLAG3_10 | 162 | TTTC | CGCTAAGTGGTGATGGGGGGA |
| LAG3 | crLAG3_11 | 163 | CTTT | CCGCTAAGTGGTGATGGGGGG |
| LAG3 | crLAG3_12 | 164 | CTTA | GCGGAAAGCTTCCTCTTCCTG |
| LAG3 | crLAG3_13 | 165 | CTTG | GGGCAGGAAGAGGAAGCTTTC |
| LAG3 | crLAG3_14 | 166 | CTTC | CTCTTCCTGCCCCAAGTCAGC |
| LAG3 | crLAG3_15 | 167 | CTTC | AACGTCTCCATCATGTATAAC |
| LAG3 | crLAG3_16 | 168 | TTTT | CTTTTCTCTTCAGGTCTGGAG |
| LAG3 | crLAG3_17 | 169 | TTTC | TGCAGCCGCTTTGGGTGGCTC |
| LAG3 | crLAG3_18 | 170 | TTTT | CTCTTCAGGTCTGGAGCCCCC |
| LAG3 | crLAG3_19 | 171 | CTTG | ACAGTGTACGCTGGAGCAGGT |
| LAG3 | crLAG3_20 | 172 | CTTG | GCAGTGAGGAAAGACCGGGTC |
| LAG3 | crLAG3_21 | 173 | TTTC | CTCACTGCCAAGTGGACTCCT |
| LAG3 | crLAG3_22 | 174 | CTTT | ACCCTTCGACTAGAGGATGTG |
| LAG3 | crLAG3_23 | 175 | TTTA | CCCTTCGACTAGAGGATGTGA |
| LAG3 | crLAG3_24 | 176 | CTTC | GACTAGAGGATGTGAGCCAGG |
| LAG3 | crLAG3_25 | 177 | TTTC | CCACCTGAGGCTGACCTGTGA |
| LAG3 | crLAG3_26 | 178 | CTTT | CCCACCTGAGGCTGACCTGTG |
| LAG3 | crLAG3_27 | 179 | CTTC | TACTCTTTTCAGTGACTCCCA |
| LAG3 | crLAG3_28 | 180 | TTTT | ACCTGGAGCCACCCAAAGCGG |
| LAG3 | crLAG3_29 | 181 | TTTT | CAGTGACTCCCAAATCCTTTG |
| LAG3 | crLAG3_30 | 182 | CTTC | CCCAGGGATCCAGGTGACCCA |
| LAG3 | crLAG3_31 | 183 | CTTT | GGGTCACCTGGATCCCTGGGG |
| LAG3 | crLAG3_32 | 184 | CTTT | GTGAGGTGACTCCAGTATCTG |
| LAG3 | crLAG3_33 | 185 | CTTT | GTGTGGAGCTCTCTGGACACC |
| LAG3 | crLAG3_34 | 186 | TTTG | TGTGGAGCTCTCTGGACACCC |
| LAG3 | crLAG3_35 | 187 | CTTG | GCTGGAGGCACAGGAGGCCCA |
| LAG3 | crLAG3_36 | 188 | TTTT | GCTCACCTAGTGAAGCCTCTC |
| LAG3 | crLAG3_37 | 189 | CTTT | CCCAGCCTTGGCAATGCCAGC |
| LAG3 | crLAG3_38 | 190 | CTTG | GCAATGCCAGCTGTACCAGGG |
| LAG3 | crLAG3_39 | 191 | CTTC | TTGGAGCAGCAGTGTACTTCA |
| LAG3 | crLAG3_40 | 192 | CTTC | ACAGAGCTGTCTAGCCCAGGT |
| LAG3 | crLAG3_41 | 193 | CTTT | CTCCATAGGTGCCCAACGCTC |
| LAG3 | crLAG3_42 | 194 | TTTC | TCCATAGGTGCCCAACGCTCT |
| LAG3 | crLAG3_43 | 195 | TTTC | TCATCCTTGGTGTCCTTTCTC |
| LAG3 | crLAG3_44 | 196 | CTTG | GTGTCCTTTCTCTGCTCCTTT |
| LAG3 | crLAG3_45 | 197 | CTTT | CTCTGCTCCTTTTGGTGACTG |
| LAG3 | crLAG3_46 | 198 | CTTC | TGCGAAGAGCAGGGGTCACTT |
| LAG3 | crLAG3_47 | 199 | CTTT | TGGTGACTGGAGCCTTTGGCT |
| LAG3 | crLAG3_48 | 200 | TTTT | GGTGACTGGAGCCTTTGGCTT |
| LAG3 | crLAG3_49 | 201 | CTTT | GGCTTTCACCTTTGGAGAAGA |
| LAG3 | crLAG3_50 | 202 | TTTG | GCTTTCACCTTTGGAGAAGAC |
| LAG3 | crLAG3_51 | 203 | CTTG | CTCTAAGGCAGAAAATCGTCT |
| LAG3 | crLAG3_52 | 204 | TTTT | CTGCCTTAGAGCAAGGGATTC |
| LAG3 | crLAG3_53 | 205 | CTTA | GAGCAAGGGATTCACCCTCCG |
| LAG3 | crLAG3_54 | 206 | TTTC | CCGCCCAGTGGCCCGCCCGCT |
| LAG3 | crLAG3_55 | 207 | CTTC | TCGCTATGGCTGCGCCCAGCC |
| LAG3 | crLAG3_56 | 208 | TTTA | TCCTTGCACAGTGACTGCCAG |
| PDCD1 | crPDCD1_1 | 209 | TTTA | GCACGAAGCTCTCCGATGTGT |
| PDCD1 | crPDCD1_2 | 210 | TTTC | TCTGCAGGGACAATAGGAGCC |
| PDCD1 | crPDCD1_3 | 211 | TTTC | CAGTGGCGAGAGAAGACCCCG |
| PDCD1 | crPDCD1_4 | 212 | TTTC | CTAGCGGAATGGGCACCTCAT |
| PDCD1 | crPDCD1_5 | 213 | CTTC | GTGCTAAACTGGTACCGCATG |
| PDCD1 | crPDCD1_6 | 214 | CTTC | AACCTGACCTGGGACAGTTTC |
| PDCD1 | crPDCD1_7 | 215 | CTTG | TCCGTCTGGTTGCTGGGGCTC |
| PDCD1 | crPDCD1_8 | 216 | CTTC | CCCGAGGACCGCAGCCAGCCC |
| PDCD1 | crPDCD1_9 | 217 | CTTC | CGTGTCACACAACTGCCCAAC |
| PDCD1 | crPDCD1_10 | 218 | CTTC | CACATGAGCGTGGTCAGGGCC |
| PDCD1 | crPDCD1_11 | 219 | CTTT | GATCTGCGCCTTGGGGGCCAG |
| PDCD1 | crPDCD1_12 | 220 | TTTG | ATCTGCGCCTTGGGGGCCAGG |
| PDCD1 | crPDCD1_13 | 221 | CTTG | GGGGCCAGGGAGATGGCCCCA |
| PDCD1 | crPDCD1_14 | 222 | CTTT | GTGCCCTTCCAGAGAGAAGGG |
| PDCD1 | crPDCD1_15 | 223 | TTTG | TGCCCTTCCAGAGAGAAGGGC |
| PDCD1 | crPDCD1_16 | 224 | TTTC | CCTTCCGCTCACCTCCGCCTG |
| PDCD1 | crPDCD1_17 | 225 | CTTC | CAGAGAGAAGGGCAGAAGTGC |
| PDCD1 | crPDCD1_18 | 226 | CTTC | TGCCCTTCTCTCTGGAAGGGC |
| PDCD1 | crPDCD1_19 | 227 | TTTG | GAACTGGCCGGCTGGCCTGGG |
| PDCD1 | crPDCD1_20 | 228 | CTTT | CTCCTCAAAGAAGGAGGACCC |
| PDCD1 | crPDCD1_21 | 229 | TTTC | TCCTCAAAGAAGGAGGACCCC |
| PDCD1 | crPDCD1_22 | 230 | CTTC | TCTCGCCACTGGAAATCCAGC |
| PDCD1 | crPDCD1_23 | 231 | CTTT | CCTAGCGGAATGGGCACCTCA |
| PDCD1 | crPDCD1_24 | 232 | CTTC | CGCTCACCTCCGCCTGAGCAG |
| PDCD1 | crPDCD1_25 | 233 | CTTG | GCCCCTCTGACCGGCTTCCTT |
| PDCD1 | crPDCD1_26 | 234 | CTTC | TCCACTGCTCAGGCGGAGGTG |
| PDCD1 | crPDCD1_27 | 235 | CTTC | TCCCCAGCCCTGCTCGTGGTG |
| PDCD1 | crPDCD1_28 | 236 | CTTC | GGTCACCACGAGCAGGGCTGG |
| PDCD1 | crPDCD1_29 | 237 | CTTC | ACCTGCAGCTTCTCCAACACA |
| PDCD1 | crPDCD1_30 | 238 | CTTC | TCCAACACATCGGAGAGCTTC |
| PTPN1 | crPTPN1_1 | 239 | TTTA | CCTGACAGCGAATCATAACAT |
| PTPN1 | crPTPN1_2 | 240 | TTTC | ATTCCAACTTACCTAACGGAA |
| PTPN1 | crPTPN1_3 | 241 | TTTC | TGTGCGCACTGGTGATGACAA |
| PTPN11 | crPTPN11_4 | 242 | TTTC | CAATCTGCTCACCTGCTTGAG |
| PTPN11 | crPTPN11_5 | 243 | TTTC | TTCTAGTTGATCATACCAGGG |
| PTPN11 | crPTPN11_6 | 244 | TTTA | ATAACTTACCTCAAATTCTTC |
| PTPN11 | crPTPN11_7 | 245 | CTTA | CCTAACGGAAAGTGTGAAGTC |
| PTPN11 | crPTPN11_8 | 246 | TTTC | CAGACACTACAACAACAGGAG |
| PTPN11 | crPTPN11_9 | 247 | TTTA | GGTGGTTTCATGGACATCTCT |
| PTPN11 | crPTPN11_10 | 248 | TTTC | CCAGAGAGATGTCCATGAAAC |
| PTPN6 | crPTPN6_1 | 249 | TTTC | TATGACCTGTATGGAGGGGAG |
| PTPN6 | crPTPN6_2 | 250 | TTTG | CGACTCTGACAGAGCTGGTGG |
| PTPN6 | crPTPN6_3 | 251 | TTTG | CAGAAGCAGGAGGTGAAGAAC |
| PTPN6 | crPTPN6_4 | 252 | TTTG | ACTGCCCCCCACCCAGGCCTG |
| PTPN6 | crPTPN6_5 | 253 | CTTA | TGGGCCCTACTCTGTGACCAA |
| PTPN6 | crPTPN6_6 | 254 | TTTC | ACCGAGACCTCAGTGGGCTGG |
| PTPN6 | crPTPN6_7 | 255 | CTTC | TCTAGGTGGTACCATGGCCAC |
| PTPN6 | crPTPN6_8 | 256 | CTTG | GCCTGCAGCAGCGTCTCTGCC |
| PTPN6 | crPTPN6_9 | 257 | TTTC | TTGTGCGTGAGAGCCTCAGCC |
| PTPN6 | crPTPN6_10 | 258 | CTTC | GTGCTTTCTGTGCTCAGTGAC |
| PTPN6 | crPTPN6_11 | 259 | CTTG | GGCTGGTCACTGAGCACAGAA |
| PTPN6 | crPTPN6_12 | 260 | CTTT | CTGTGCTCAGTGACCAGCCCA |
| PTPN6 | crPTPN6_13 | 261 | TTTC | TGTGCTCAGTGACCAGCCCAA |
| PTPN6 | crPTPN6_14 | 262 | CTTG | ATGTGGGTGACCCTGAGCGGG |
| PTPN6 | crPTPN6_15 | 263 | CTTA | CCTCGCACATGACCTTGATGT |
| PTPN6 | crPTPN6_16 | 264 | TTTG | GCTCCCCCCAGGGTGGACGCT |
| PTPN6 | crPTPN6_17 | 265 | CTTG | AGCAGGGTCTCTGCATCCAGC |
| PTPN6 | crPTPN6_18 | 266 | TTTG | GAGACCTTCGACAGCCTCACG |
| PTPN6 | crPTPN6_19 | 267 | CTTC | GACAGCCTCACGGACCTGGTG |
| PTPN6 | crPTPN6_20 | 268 | TTTC | AAGAAGACGGGGATTGAGGAG |
| PTPN6 | crPTPN6_21 | 269 | CTTC | TTGTTCAGTTCCAACACTCGG |
| PTPN6 | crPTPN6_22 | 270 | CTTG | GCTGTATCCTCGGACTCCTGC |
| PTPN6 | crPTPN6_23 | 271 | TTTC | CCCACCCACATCTCAGAGTTT |
| PTPN6 | CrPTPN6_24 | 272 | CTTC | CAGACGCTGGTGCAAGTTCTT |
| PTPN6 | crPTPN6_25 | 273 | CTTG | CACCAGCGTCTGGAAGGGCAG |
| PTPN6 | crPTPN6_26 | 274 | CTTG | TTCTCTGGCCGCTGCCCTTCC |
| PTPN6 | crPTPN6_27 | 275 | CTTG | ATGTAGTTGGCATTGATGTAG |
| PTPN6 | crPTPN6_28 | 276 | CTTG | CGTCCAGAACCAGCTGCTAGG |
| PTPN6 | crPTPN6_29 | 277 | CTTC | TGGCAGATGGCGTGGCAGGAG |
| PTPN6 | crPTPN6_30 | 278 | TTTC | TCCACCTCTCGGGTGGTCATG |
| PTPN6 | crPTPN6_31 | 279 | CTTT | CTCCACCTCTCGGGTGGTCAT |
| PTPN6 | crPTPN6_32 | 280 | CTTT | CCAGAACAAATGCGTCCCATA |
| PTPN6 | crPTPN6_33 | 281 | TTTC | CAGAACAAATGCGTCCCATAC |
| PTPN6 | crPTPN6_34 | 282 | TTTG | TATTCGGTTGTGTCATGCTCC |
| PTPN6 | crPTPN6_35 | 283 | CTTA | CAGGTCTCCCCGCTGGACAAT |
| PTPN6 | crPTPN6_36 | 284 | CTTC | CTGGCTCGGCCCAGTCGCAAG |
| PTPN6 | crPTPN6_37 | 285 | CTTA | GGGAGACCTGATTCGGGAGAT |
| PTPN6 | crPTPN6_38 | 286 | CTTC | CTGGACCAGATCAACCAGCGG |
| PTPN6 | crPTPN6_39 | 287 | TTTC | CTGCCGCTGGTTGATCTGGTC |
| PTPN6 | crPTPN6_40 | 288 | CTTT | CCTGCCGCTGGTTGATCTGGT |
| PTPN6 | crPTPN6_41 | 289 | CTTG | GTGGAGATGTTCTCCATGAGC |
| PTPN6 | crPTPN6_42 | 290 | CTTG | TACTGCGCCTCCGTCTGCACC |
| PTPN6 | crPTPN6_43 | 291 | TTTC | AATGAACTGGGCGATGGCCAC |
| PTPN6 | crPTPN6_44 | 292 | CTTC | TTCTTAGTGGTTTCAATGAAC |
| PTPN6 | crPTPN6_45 | 293 | CTTC | TCCCCTCCATACAGGTCATAG |
| PTPN6 | crPTPN6_46 | 294 | CTTG | GAGTCTAGTGCAGGGACCGTG |
| PTPN6 | crPTPN6_47 | 295 | CTTG | CCCCCCTGCACCCGGCTGCAG |
| PTPN6 | crPTPN6_48 | 296 | CTTG | TGTCTGCAGCCGGGTGCAGGG |
| PTPN6 | crPTPN6_49 | 297 | TTTC | TCCTCCCTCTTGTTCTTAGTG |
| PTPN6 | crPTPN6_50 | 298 | CTTT | CTCCTCCCTCTTGTTCTTAGT |
| PTPN6 | crPTPN6_51 | 299 | CTTC | TTCACTTTCTCCTCCCTCTTG |
| PTPN6 | crPTPN6_52 | 300 | CTTG | AGGTGGATGATGGTGCCGTCG |
| PTPN6 | crPTPN6_53 | 301 | CTTC | CCTGACGCTGCCTTCTCTAGG |
| TIGIT | CrTIGIT_1 | 302 | TTTC | AGGCCTTACCTGAGGCGAGGG |
| TIGIT | crTIGIT_2 | 303 | TTTT | GTCCTCCCTCTAGTGGCTGAG |
| TIGIT | CrTIGIT_3 | 304 | CTTG | GGGTGGCACATCTCCCCATCC |
| TIGIT | crTIGIT_4 | 305 | TTTC | TGCAGAGAAAGGTGGCTCTAT |
| TIGIT | CrTIGIT_5 | 306 | TTTG | TAATGCTGACTTGGGGTGGCA |
| TIGIT | crTIGIT_6 | 307 | CTTA | CCTGAGGCGAGGGGAGCCTGC |
| TIGIT | crTIGIT_7 | 308 | CTTG | AAGGATGGGGAGATGTGCCAC |
| TIGIT | CrTIGIT_8 | 309 | CTTC | AAGGATCGAGTGGCCCCAGGT |
| TIGIT | CrTIGIT_9 | 310 | CTTC | TGCATCTATCACACCTACCCT |
| TIGIT | CrTIGIT_10 | 311 | TTTC | TAGGACCTCCAGGAAGATTCT |
| TIGIT | crTIGIT_11 | 312 | CTTT | CTAGGACCTCCAGGAAGATTC |
| TIGIT | crTIGIT_12 | 313 | CTTG | CTCCAGCAGGAATACCTGAGC |
| TIGIT | CrTIGIT_13 | 314 | CTTG | GAGCCATGGCCGCGACGCTGG |
| TIGIT | CrTIGIT_14 | 315 | TTTC | TAGTCAACGCGACCACCACGA |
| TIGIT | CrTIGIT_15 | 316 | CTTT | CTAGTCAACGCGACCACCACG |
| TIGIT | CrTIGIT_16 | 317 | TTTG | TAGTTTGTTTGTTTTTAGAAG |
| TIGIT | CrTIGIT_17 | 318 | TTTG | TTTGTTTTTAGAAGAAAGCCC |
| TIGIT | CrTIGIT_18 | 319 | TTTG | TTTTTAGAAGAAAGCCCTCAG |
| TIGIT | CrTIGIT_19 | 320 | TTTT | TAGAAGAAAGCCCTCAGAATC |
| TIGIT | CrTIGIT_20 | 321 | CTTC | CACAGAATGGATTCTGAGGGC |
| TIGIT | CrTIGIT_21 | 322 | TTTT | CTCCTGAGGTCACCTTCCACA |
| TIGIT | CrTIGIT_22 | 323 | CTTC | CTGGGGGTGAGGGAGCACTGG |
| TIGIT | CrTIGIT_23 | 324 | CTTC | TGCCTGGACACAGCTTCCTGG |
| TIGIT | CrTIGIT_24 | 325 | CTTC | GTCCTCTTCCCTAGGAATGAT |
| TIGIT | CrTIGIT_25 | 326 | CTTC | TGTAACTCAGGACATTGAAGT |
| TIGIT | CrTIGIT_26 | 327 | CTTC | AATGTCCTGAGTTACAGAAGC |
| TIGIT | CrTIGIT_27 | 328 | TTTC | TATTGTGCCTGTCATCATTCC |
| TIGIT | CrTIGIT_28 | 329 | TTTC | TCTGCAGAAATGTTCCCCGTT |
| TIGIT | CrTIGIT_29 | 330 | CTTT | CTCTGCAGAAATGTTCCCCGT |
| TIGIT | CrTIGIT_30 | 331 | CTTG | TGCCGTGGTGGAGGAGAGGTG |
| TIGIT | crTIGIT_31 | 332 | CTTC | TGGCCATTTGTAATGCTGACT |
| TIM3 | crTIM3_1 | 333 | CTTA | CTTGTAAGTAGTAGCAGCAGC |
| TIM3 | crTIM3_2 | 334 | TTTC | CAAGGATGCTTACCACCAGGG |
| TIM3 | crTIM3_3 | 335 | CTTG | TAAGTAGTAGCAGCAGCAGCA |
| TIM3 | crTIM3_4 | 336 | CTTA | CCACCAGGGGACATGGCCCAG |
| TIM3 | crTIM3_5 | 337 | TTTG | AATGTGGCAACGTGGTGCTCA |
| TIM3 | crTIM3_6 | 338 | CTTT | TCTTCTGCAAGCTCCATGTTT |
| TIM3 | crTIM3_7 | 339 | CTTT | GCCCCAGCAGACGGGCACGAG |
| TIM3 | crTIM3_8 | 340 | TTTC | ATCAGTCCTGAGCACCACGTT |
| TIM3 | crTIM3_9 | 341 | CTTT | CATCAGTCCTGAGCACCACGT |
| TIM3 | crTIM3_10 | 342 | TTTA | GCCAGTATCTGGATGTCCAAT |
| TIM3 | crTIM3_11 | 343 | TTTG | CGGAAATCCCCATTTAGCCAG |
| TIM3 | crTIM3_12 | 344 | CTTT | GCGGAAATCCCCATTTAGCCA |
| TIM3 | crTIM3_13 | 345 | TTTC | CGCAAAGGAGATGTGTCCCTG |
| TIM3 | crTIM3_14 | 346 | TTTG | GATCCGGCAGCAGTAGATCCC |
| TIM3 | crTIM3_15 | 347 | TTTT | TCATCATTCATTATGCCTGGG |
| TIM3 | crTIM3_16 | 348 | TTTT | CTTCTGCAAGCTCCATGTTTT |
| TIM3 | crTIM3_17 | 349 | CTTC | AGGTTAAATTTTTCATCATTC |
| TIM3 | crTIM3_18 | 350 | TTTG | ATGACCAACTTCAGGTTAAAT |
| TIM3 | crTIM3_19 | 351 | TTTA | ACCTGAAGTTGGTCATCAAAC |
| TIM3 | crTIM3_20 | 352 | CTTA | TGTTGTTTCTGACATTAGCCA |
| TIM3 | crTIM3_21 | 353 | TTTC | TGACATTAGCCAAGGTCACCC |
| TIM3 | crTIM3_22 | 354 | CTTG | GAAAGGCTGCAGTGAAGTCTC |
| TIM3 | crTIM3_23 | 355 | CTTC | ACTGCAGCCTTTCCAAGGATG |
| TIM3 | crTIM3_24 | 356 | CTTT | CCAAGGATGCTTACCACCAGG |
| TIM3 | crTIM3_25 | 357 | TTTT | CACATCTTCCCTTTGACTGTG |
| TIM3 | crTIM3_26 | 358 | TTTT | TATAGCAGAGACACAGACACT |
| TIM3 | crTIM3_27 | 359 | TTTA | TATCAGGGAGGCTCCCCAGTG |
| TIM3 | CrTIM3_28 | 360 | CTTA | CTGTTAGATTTATATCAGGGA |
| TIM3 | CrTIM3_29 | 361 | TTTG | TGTTTCCATAGCAAATATCCA |
| TIM3 | crTIM3_30 | 362 | TTTC | CATAGCAAATATCCACATTGG |
| TIM3 | crTIM3_31 | 363 | CTTA | CGGGACTCTGGAGCAACCATC |
| TIM3 | crTIM3_32 | 364 | TTTG | AAAATTAAAGCGCCGAAGATA |
| TIM3 | crTIM3_33 | 365 | CTTA | CATTTGAAAATTAAAGCGCCG |
| TIM3 | crTIM3_34 | 366 | CTTT | TGTTTCCCCCTTACTAGGGTA |
| TIM3 | crTIM3_35 | 367 | TTTT | GTTTCCCCCTTACTAGGGTAT |
| TIM3 | CrTIM3_36 | 368 | CTTT | GACTGTGTCCTGCTGCTGCTG |
| TIM3 | crTIM3_37 | 369 | TTTC | CCCCTTACTAGGGTATTCTCA |
| TIM3 | crTIM3_38 | 370 | CTTA | CTAGGGTATTCTCATAGCAAA |
| TIM3 | crTIM3_39 | 371 | CTTA | AATTCTGTATCTTCTCTTTGC |
| TIM3 | crTIM3_40 | 372 | CTTT | ATTTCCACAGCCTCATCTCTT |
| TIM3 | crTIM3_41 | 373 | TTTA | TTTCCACAGCCTCATCTCTTT |
| TIM3 | crTIM3_42 | 374 | TTTC | CACAGCCTCATCTCTTTGGCC |
| TIM3 | crTIM3_43 | 375 | TTTG | GCCAACCTCCCTCCCTCAGGA |
| TIM3 | crTIM3_44 | 376 | TTTG | CCAATCCTGAGGGAGGGAGGT |
| TIM3 | crTIM3_45 | 377 | TTTT | CTTCTGAGCGAATTCCCTCTG |
| TIM3 | crTIM3_46 | 378 | CTTC | ATATACGTTCTCTTCAATGGT |
| TIM3 | crTIM3_47 | 379 | CTTT | GGGTTGTCGCTTTGCAATGCC |
| TIM3 | crTIM3_48 | 380 | TTTG | GGTTGTCGCTTTGCAATGCCA |
| TIM3 | crTIM3_49 | 381 | CTTC | TCTCTCTATGCAGGGTCCTCA |
| TIM3 | crTIM3_50 | 382 | CTTC | TACACCCCAGCCGCCCCAGGG |
| TIM3 | crTIM3_51 | 383 | TTTG | CCCCAGCAGACGGGCACGAGG |
| AAVS1 | crAAVS1 | 384 | TTTC | TTAGGATGGCCTTCTCCGACG |

TABLE 6
Spacer sequences

| Target | | SEQ ID | |
|---|---|---|---|
| Gene | Name | NO | Spacer Sequence |
| APLNR | RNA0235_gAPLNR_002 | 1549 | CAGTCTGTGTACTCACACTCA |
| APLNR | RNA0236_gAPLNR_001 | 1550 | ACAACTACTATGGGGCAGACA |
| APLNR | RNA0237_gAPLNR_008 | 1551 | CCCTGTGCTGGATGCCCTACC |
| APLNR | RNA0238_gAPLNR_011 | 1552 | TCGTGCATCTGTTCTCCACCC |
| APLNR | RNA0239_gAPLNR_003 | 1553 | GGAGCAGCCGGGAGAAGAGGC |
| APLNR | RNA0240_gAPLNR_010 | 1554 | GACCCCCGCTTCCGCCAGGCC |
| APLNR | RNA0241_gAPLNR_007 | 1555 | GGCGATGAAGAAGTAACAGGT |
| APLNR | RNA0242_gAPLNR_009 | 1556 | ACCTCTTCCTCATGAACATCT |
| APLNR | RNA0243_gAPLNR_004 | 1557 | GGACCTTCTTCTGCAAGCTCA |
| APLNR | RNA0244_gAPLNR_006 | 1558 | TGGTGCCCTTCACCATCATGC |
| BBS1 | RNA0245_gBBS1_005 | 1559 | CATGGGGATGGGGAATACAAG |
| BBS1 | RNA0246_gBBS1_015 | 1560 | ACTTAGCTCCAGCTGCAGAAA |
| BBS1 | RNA0247_gBBS1_007 | 1561 | GGTCATCACCAGTGGTCCITT |
| BBS1 | RNA0248_gBBS1_032 | 1562 | CGTGGATCAGACACTGCGAGA |
| BBS1 | RNA0249_gBBS1_016 | 1563 | CAAATGCCTCCATTTCACTTA |
| BBS1 | RNA0250_gBBS1_018 | 1564 | TAAACCAACACAAGTCCAACT |
| BBS1 | RNA0251_gBBS1_009 | 1565 | GCCTGGTTCCAAAGGTCTTGT |
| BBS1 | RNA0252_gBBS1_033 | 1566 | TCCACCCACCCTCTCCATAGG |
| BBS1 | RNA0253_gBBS1_028 | 1567 | CACTGTCCACTTCCCTAGGTG |
| BBS1 | RNA0254_gBBS1_017 | 1568 | TGCAGCTGGAGCTAAGTGAAA |
| CALR | RNA0225_gCALR_019 | 1539 | TGGGTGGATCCAAGTGCCCTT |
| CALR | RNA0226_gCALR_013 | 1540 | GACCAGACAGACATGCACGGA |
| CALR | RNA0227_gCALR_015 | 1541 | CACACCTGTACACACTGATTG |
| CALR | RNA0228_gCALR_012 | 1542 | CTAATAGTTTGGACCAGACAG |
| CALR | RNA0229_gCALR_001 | 1543 | GATTCGATCCAGCGGGAAGTC |
| CALR | RNA0230_gCALR_021 | 1544 | CTCCAAGTCTCACCTGCCAGA |
| CALR | RNA0231_gCALR_006 | 1545 | CAGACAAGCCAGGATGCACGC |
| CALR | RNA0232_gCALR_011 | 1546 | ACCGTGAACTGCACCACCAGC |
| CALR | RNA0233_gCALR_014 | 1547 | CCACCACCCCCAGGCACACCT |
| CALR | RNA0234_gCALR_017 | 1548 | AAGCATCAGGATCCTTTATCT |
| CD247 | RNA0210_gCD247_002 | 86 | ACCGCGGCCATCCTGCAGGCA |
| CD247 | RNA0207_gCD247_001 | 87 | TGAGGGAAAGGACAAGATGAA |
| CD247 | RNA0206_gCD247_004 | 88 | GGATCCAGCAGGCCAAAGCTC |
| CD247 | RNA0208_gCD247_011 | 89 | CTAGCAGAGAAGGAAGAACCC |
| CD247 | RNA0214_gCD247_007 | 90 | TGTGTTGCAGTTCAGCAGGAG |
| CD247 | RNA0213_gCD247_012 | 95 | ATCCCAATCTCACTGTAGGCC |
| CD247 | RNA0205_gCD247_013 | 99 | ACTCCCAAACAACCAGCGCCG |
| CD247 | RNA0212_gCD247_015 | 103 | CTTTCACGCCAGGGTCTCAGT |
| CD247 | RNA0211_gCD247_016 | 104 | ACGCCAGGGTCTCAGTACAGC |
| CD247 | RNA0209_gCD247_005 | 1528 | GCCTGCTGGATCCCAAACTCT |
| CD38 | RNA0415_gCD38_001 | 1729 | TCCCCGGACACCGGGCTGAAC |
| CD38 | RNA0416_gCD38_002 | 1730 | AGTGTACTTGACGCATCGCGC |
| CD38 | RNA0417_gCD38_003 | 1731 | CCGAGACCGTCCTGGCGCGAT |
| CD38 | RNA0418_gCD38_004 | 1732 | GCAGTCTACATGTCTGAGATA |
| CD38 | RNA0419_gCD38_005 | 1733 | TGTGTTTTATCTCAGACATGT |
| CD38 | RNA0420_gCD38_006 | 1734 | TCTCAGACATGTAGACTGCCA |
| CD38 | RNA0421_gCD38_007 | 1735 | AAATAAATGCACCCTTGAAAG |
| CD38 | RNA0422_gCD38_008 | 1736 | AAGGGTGCATTTATTTCAAAA |
| CD38 | RNA0423_gCD38_009 | 1737 | TTTCAAAACATCCTTGCAACA |
| CD38 | RNA0424_gCD38_010 | 1738 | AAAACATCCTTGCAACATTAC |
| CD38 | RNA0425_gCD38_011 | 1739 | TTCTGCTCCAAAGAAGAATCT |
| CD38 | RNA0426_gCD38_012 | 1740 | TTCTTCCTTAGATTCTTCTTT |
| CD38 | RNA0427_gCD38_013 | 1741 | GAGCAGAATAAAAGATCTGGC |
| CD38 | RNA0428_gCD38_014 | 1742 | TACAAACTATGTCTTTTAGAA |
| CD38 | RNA0429_gCD38_015 | 1743 | TCCAGTCTGGGCAAGATTGAT |
| CD38 | RNA0430_gCD38_016 | 1744 | GAAATAAACTATCAATCTTGC |
| CD38 | RNA0431_gCD38_017 | 1745 | CAGAATACTGAAACAGGGTTG |
| CD38 | RNA0432_gCD38_018 | 1746 | AGTATTCTGGAAAACGGTTTC |
| CD38 | RNA0433_gCD38_019 | 1747 | ACTACTTGGTACTTACCCTGC |
| CD38 | RNA0434_gCD38_020 | 1748 | AGTTTGCAGAAGCTGCCTGTG |
| CD38 | RNA0435_gCD38_021 | 1749 | CAGAAGCTGCCTGTGATGTGG |
| CD38 | RNA0436_gCD38_022 | 1750 | CTGCGGGATCCATTGAGCATC |
| CD38 | RNA0437_gCD38_023 | 1751 | TCAAAGATTTTACTGCGGGAT |
| CD38 | RNA0438_gCD38_024 | 1752 | GGGTTCTTTGTTTCTTCTATT |
| CD38 | RNA0439_gCD38_025 | 1753 | TTTCTTCTATTTTAGCACTTT |
| CD38 | RNA0440_gCD38_026 | 1754 | TTCTATTTTAGCACTTTTGGG |
| CD38 | RNA0441_gCD38_027 | 1755 | GCACTTTTGGGAGTGTGGAAG |
| CD38 | RNA0442_gCD38_028 | 1756 | GGAGTGTGGAAGTCCATAATT |
| CD38 | RNA0443_gCD38_029 | 1757 | CAACCAGAGAAGGTTCAGACA |
| CD38 | RNA0444_gCD38_030 | 1758 | TGGTGGGATCCTGGCATAAGT |
| CD38 | RNA0445_gCD38_031 | 1759 | TTCCCCAGAGACTTATGCCAG |
| CD38 | RNA0446_gCD38_032 | 1760 | CTTATAATCGATTCCAGCTCT |
| CD38 | RNA0447_gCD38_033 | 1761 | CTTTTTTGCTTTCTTGTCATA |
| CD38 | RNA0448_gCD38_034 | 1762 | CTTTCTTGTCATAGACCTGAC |
| CD38 | RNA0449_gCD38_035 | 1763 | ACACACTGAAGAAACTTGTCA |
| CD38 | RNA0450_gCD38_036 | 1764 | TTGTCATAGACCTGACAAGTT |
| CD38 | RNA0451_gCD38_037 | 1765 | TTCAGTGTGTGAAAAATCCTG |
| CD3G | RNA0195_gCD3G_017 | 1518 | CCTCTCGACTGGCGAACTCCA |
| CD3G | RNA0196_gCD3G_004 | 1519 | GCTTCTGCATCACAAGTCAGA |
| CD3G | RNA0197_gCD3G_011 | 1520 | GTTCAATGCAGTTCTGACACA |
| CD3G | RNA0198_gCD3G_001 | 1521 | CCGGAGGACAGAGACTGACAT |
| CD3G | RNA0199_gCD3G_012 | 1522 | CCTACAGTGTGTCAGAACTGC |
| CD3G | RNA0200_gCD3G_007 | 1523 | AAGATGGGAAGATGATCGGCT |
| CD3G | RNA0201_gCD3G_022 | 1524 | CTTGAAGGTGGCTGTACTGGT |
| CD3G | RNA0202_gCD3G_008 | 1525 | CACTGATACATCCCTCGAGGG |
| CD3G | RNA0203_gCD3G_006 | 1526 | TCTTCAGTTAGGAAGCCGATC |
| CD3G | RNA0204_gCD3G_023 | 1527 | CAGGTACTTTGGCCCAGTCAA |
| CD52 | RNA0143_gCD52_1 | 985 | CTCTTCCTCCTACTCACCATC |
| CD52 | RNA0144_gCD52_4 | 1039 | GCTGGTGTCGTTTTGTCCTGA |
| CD52 | RNA0141_gCD52_9 | 1466 | TTCGTGGCCAATGCCATAATC |
| CD52 | RNA0142_gCD52_10 | 1467 | TCCTGAGAGTCCAGTTTGTAT |
| CD58 | RNA0255_gCD58_033 | 1569 | GGTATTCTGAAATGTGACAGA |
| CD58 | RNA0256_gCD58_005 | 1570 | AAGGCACATTGCTTGGTACAT |
| CD58 | RNA0257_gCD58_004 | 1571 | CCAACAAATATATGGTGTTGT |
| CD58 | RNA0258_gCD58_020 | 1572 | CATTGCTCCATAGGACAATCC |
| CD58 | RNA0259_gCD58_023 | 1573 | AGATGGAAAATGATCTTCCAC |
| CD58 | RNA0260_gCD58_012 | 1574 | AAAGATGAGAAAGCTCTGAAT |
| CD58 | RNA0261_gCD58_028 | 1575 | TAGGTCATTCAAGACACAGAT |
| CD58 | RNA0262_gCD58_019 | 1576 | CAGAGTCTCTTCCATCTCCCA |
| CD58 | RNA0263_gCD58_010 | 1577 | AAAGAGGTCCTATGGAAAAAA |
| CD58 | RNA0264_gCD58_018 | 1578 | GCGATTCCATTTCATACTCAT |
| COL17A1 | RNA0265_gCOL17A1_084 | 1579 | AGAGGGGTCATCGATGCTCAC |
| COL17A1 | RNA0266_gCOL17A1_070 | 1580 | GGTGACAAAGGACCAATGGGA |
| COL17A1 | RNA0267_gCOL17A1_006 | 1581 | GCATAGCCATTGCTGGTCCCG |
| COL17A1 | RNA0268_gCOL17A1_024 | 1582 | CAGTGTCAGGCACCTACGATG |
| COL17A1 | RNA0269_gCOL17A1_094 | 1583 | ATGCCGGCTCTACTGTACCTT |
| COL17A1 | RNA0270_gCOL17A1_054 | 1584 | AGGTGACATGGGAAGTCCAGG |
| COL17A1 | RNA0271_gCOL17A1_005 | 1585 | TAGTTGTCACTGAAACAGTAA |
| COL17A1 | RNA0272_gCOL17A1_065 | 1586 | CAAGAAGCAGCAAACTGACCT |
| COL17A1 | RNA0273_gCOL17A1_047 | 1587 | CTGTTCCATCATTAGCTTCTT |
| COL17A1 | RNA0274_gCOL17A1_017 | 1588 | ACTCCGTCCTCTGGTTGAAGA |
| CSF1R | RNA0478_gCSF1R_001 | 1792 | CAGAGAGTGCCTACTTGAACT |
| CSF1R | RNA0479_gCSF1R_002 | 1793 | TGGTCCCTCCCACCCTCAGGA |
| DEFB134 | RNA0275_gDEFB134_007 | 1589 | CTTCCAGGTATAAATTCATTA |
| DEFB134 | RNA0276_gDEFB134_001 | 1590 | CCTGCCAGCACTGGATCCCAA |
| DEFB134 | RNA0277_gDEFB134_012 | 1591 | CTTTGACACAGCACTCCAGCT |
| DEFB134 | RNA0278_gDEFB134_010 | 1592 | ACTCTCATAGCATTCAAGTCT |
| DEFB134 | RNA0279_gDEFB134_004 | 1593 | CTTTGGGATCCAGTGCTGGCA |
| DEFB134 | RNA0280_gDEFB134_013 | 1594 | AGCTGGAGTGCTGTGTCAAAG |
| DEFB134 | RNA0281_gDEFB134_014 | 1595 | TTATGTCAGGGTGCAGGATTT |
| DEFB134 | RNA0282_gDEFB134_011 | 1596 | ACACAGCACTCCAGCTGAAAC |
| DEFB134 | RNA0283_gDEFB134_009 | 1597 | TAGCATTTCTTGTGCATTTCT |
| DEFB134 | RNA0284_gDEFB134_008 | 1598 | TTGTGCATTTCTGATGATAAT |
| ERAP1 | RNA0345_gERAP1_037 | 1659 | AGCATACCGTATCCCCTACCC |
| ERAP1 | RNA0346_gERAP1_077 | 1660 | CCCTAATAACCATCACAGTGA |
| ERAP1 | RNA0347_gERAP1_035 | 1661 | GGTAGGGGATACGGTATGCTG |
| ERAP1 | RNA0348_gERAP1_078 | 1662 | CTCTAGGAGCATTACCCAGTG |
| ERAP1 | RNA0349_gERAP1_029 | 1663 | AGTCTGTCAGCAAGATAACCA |
| ERAP1 | RNA0350_gERAP1_008 | 1664 | CATGGATCAAGAGATCATAAT |
| ERAP1 | RNA0351_gERAP1_065 | 1665 | AATGCGTCAGCACTAAGATAC |
| ERAP1 | RNA0352_gERAP1_061 | 1666 | CCTTATCATAAGAAACATCAT |
| ERAP1 | RNA0353_gERAP1_039 | 1667 | CATAGCACCAGACTGAAAGTC |
| ERAP1 | RNA0354_gERAP1_015 | 1668 | CAAAAGCACCTACAGAACCAA |
| ERAP2 | RNA0355_gERAP2_046 | 1669 | GAGAGTGGATAGTAGATATCA |
| ERAP2 | RNA0356_gERAP2_018 | 1670 | AGTTACCCTGCTCATGAACAA |
| ERAP2 | RNA0357_gERAP2_099 | 1671 | ATGTGGACTCAAATGGTTACT |
| ERAP2 | RNA0358_gERAP2_118 | 1672 | GAGCAATATGAACTGTCAATG |
| ERAP2 | RNA0359_gERAP2_001 | 1673 | TGTGTGAATTAACCATTGCAG |
| ERAP2 | RNA0360_gERAP2_134 | 1674 | ACTTGGGCTCATATGACATAA |
| ERAP2 | RNA0361_gERAP2_048 | 1675 | ATATCTACTATCCACTCTCCA |
| ERAP2 | RNA0362_gERAP2_261 | 1676 | TCCTTACCATGTTACTTGTCA |
| ERAP2 | RNA0363_gERAP2_108 | 1677 | CCTGTCAATCACTGGCTTAAA |
| ERAP2 | RNA0364_gERAP2_014 | 1678 | ATGTATCTTGAATCTTCCTCT |
| FAS | RNA0467_gFAS_93 | 1781 | TATTTTTCAGATGTTGACTTG |
| FAS | RNA0468_gFAS_94 | 1782 | AGATGTTGACTTGAGTAAATA |
| FAS | RNA0469_gFAS_95 | 1783 | ACTTGACTTAGTGTCATGACT |
| FAS | RNA0470_gFAS_96 | 1784 | GCTTCATTGACACCATTCTTT |
| FAS | RNA0471_gFAS_97 | 1785 | AGATCTTTAATCAATGTGTCA |
| FAS | RNA0472_gFAS_98 | 1786 | TCTGCAAGAGTACAAAGATTG |
| FAS | RNA0473_gFAS_99 | 1787 | TGAGTCACTAGTAATGTCCTT |
| FAS | RNA0474_gFAS_100 | 1788 | CTTTCTAGGAAACAGTGGCAA |
| FAS | RNA0475_gFAS_101 | 1789 | CTTTCTGTGCTTTCTGCATGT |
| FAS | RNA0476_gFAS_102 | 1790 | CCAATTCCACTAATTGTTTGG |
| FAS | RNA0477_gFAS_103 | 1791 | TAGATGTGAACATGGAATCAT |
| mir-101-2 | RNA0305_gmir-101- | 1619 | GGTTATCATGGTACCGATGCT |
| | 2_001 | | |
| mir-101-2 | RNA0306_gmir-101- | 1620 | AGATATACAGCATCGGTACCA |
| | 2_002 | | |
| mir-101-2 | RNA0307_gmir-101- | 1621 | TCAATGTGATGGCACCACCAT |
| | 2_003 | | |
| IFNGR1 | RNA0365_gIFNGR1_025 | 1679 | AGTTGTAACACCCCACACATG |
| IFNGR1 | RNA0366_gIFNGR1_006 | 1680 | CCGTAGAGGTAAAGAACTATG |
| IFNGR1 | RNA0367_gIFNGR1_042 | 1681 | GAGACAAAACCTGAATCAAAA |
| IFNGR1 | RNA0368_gIFNGR1_008 | 1682 | GTGTTAAGAATTCAGAATGGA |
| IFNGR1 | RNA0369_gIFNGR1_010 | 1683 | ATGGATCACCAACATGATCAG |
| IFNGR1 | RNA0370_gIFNGR1_004 | 1684 | TTACAGTGCCTACACCAACTA |
| IFNGR1 | RNA0371_gIFNGR1_049 | 1685 | AGTAGTAACCAGTCTGAACCT |
| IFNGR1 | RNA0372_gIFNGR1_012 | 1686 | ACTCTGACCCAAAGAGAATTT |
| IFNGR1 | RNA0373_gIFNGR1_021 | 1687 | GGGATCATAATCGACTTCCTG |
| IFNGR1 | RNA0374_gIFNGR1_052 | 1688 | TGGAGTGATCACTCTCAGAAC |
| IFNGR2 | RNA0375_gIFNGR2_012 | 1689 | CCAGTAATGGACATAATAACA |
| IFNGR2 | RNA0376_gIFNGR2_021 | 1690 | GTAGCAAGATATGTTGCTTAA |
| IFNGR2 | RNA0377_gIFNGR2_001 | 1691 | TCTGTCCCCCTCAAGACCCTC |
| IFNGR2 | RNA0378_gIFNGR2_006 | 1692 | AATGTCACTCTACGCCTTCGA |
| IFNGR2 | RNA0379_gIFNGR2_017 | 1693 | ATTGGATAACTTAAAACCCTC |
| IFNGR2 | RNA0380_gIFNGR2_005 | 1694 | CTTCCCAGCACCGACAGTAAA |
| IFNGR2 | RNA0381_gIFNGR2_015 | 1695 | AGTTATCCAATGAAATGGAGT |
| IFNGR2 | RNA0382_gIFNGR2_031 | 1696 | ACACTCCACCAAGCATCCCAT |
| IFNGR2 | RNA0383_gIFNGR2_026 | 1697 | GCCTCCACTGAGCTTCAGCAA |
| IFNGR2 | RNA0384_gIFNGR2_003 | 1698 | AACTGCACTTGGTAGACAACA |
| JAK1 | RNA0385_gJAK1_021 | 1699 | GCTACAAGCGATATATTCCAG |
| JAK1 | RNA0386_gJAK1_090 | 1700 | AGATCAGCTATGTGGTTACCT |
| JAK1 | RNA0387_gJAK1_100 | 1701 | CCTTACAAATCTGAACGGCAT |
| JAK1 | RNA0388_gJAK1_108 | 1702 | ACCAAAGCAATTGAAACCGAT |
| JAK1 | RNA0389_gJAK1_075 | 1703 | CCAGAGCGTGGTTCCAAAGCT |
| JAK1 | RNA0390_gJAK1_002 | 1704 | CTTCCACAACAGTATCTAAAT |
| JAK1 | RNA0391_gJAK1_074 | 1705 | GTACACACATTTCCATGGACC |
| JAK1 | RNA0392_gJAK1_059 | 1706 | GCATGAAGCTGATGTTATCCG |
| JAK1 | RNA0393_gJAK1_037 | 1707 | ATTCGAATGACGGTGGAAACG |
| JAK1 | RNA0394_gJAK1_111 | 1708 | GATTGCATTAAACATTCTGGA |
| JAK2 | RNA0395_gJAK2_187 | 1709 | GGTTAACCAAAGTCTTGCCAC |
| JAK2 | RNA0396_gJAK2_118 | 1710 | AGATATGTATCTAGTGATCCA |
| JAK2 | RNA0397_gJAK2_137 | 1711 | CCACAAAGTGGTACCAAAACT |
| JAK2 | RNA0398_gJAK2_009 | 1712 | GAAGCAGCAATACAGATTTCT |
| JAK2 | RNA0399_gJAK2_132 | 1713 | AATGCATTCAGGTGGTACCCA |
| JAK2 | RNA0400_gJAK2_191 | 1714 | CAGGTATGCTCCAGAATCACT |
| JAK2 | RNA0401_gJAK2_175 | 1715 | AAGATAGTCTCGTAAACTTCC |
| JAK2 | RNA0402_gJAK2_101 | 1716 | AAGGCGTACGAAGAGAAGTAG |
| JAK2 | RNA0403_gJAK2_121 | 1717 | GATCACTAGATACATATCTGA |
| JAK2 | RNA0404_gJAK2_126 | 1718 | GCACATACATTCCCATGAATA |
| MLANA | RNA0295_gMLANA_003 | 1609 | GTCTTCTACAATACCAACAGC |
| MLANA | RNA0296_gMLANA_020 | 1610 | TCATAAGCAGGTGGAGCATTG |
| MLANA | RNA0297_gMLANA_010 | 1611 | CTGTCCCGATGATCAAACCCT |
| MLANA | RNA0298_gMLANA_004 | 1612 | CCAACCATCAAGGCTCTGTAT |
| MLANA | RNA0299_gMLANA_011 | 1613 | TCTTGAAGAGACACTTTGCTG |
| MLANA | RNA0300_gMLANA_009 | 1614 | AGGATAAAAGTCTTCATGTTG |
| MLANA | RNA0301_gMLANA_001 | 1615 | AACTTACTCTTCAGCCGTGGT |
| MLANA | RNA0302_gMLANA_008 | 1616 | CATTTCAGGATAAAAGTCTTC |
| MLANA | RNA0303_gMLANA_002 | 1617 | TCTATCTCTTGGGCCAGGGCC |
| MLANA | RNA0304_gMLANA_012 | 1618 | ATCATCGGGACAGCAAAGTGT |
| PSMB5 | RNA0215_gPSMB5_007 | 1529 | GAGGCAGCTGCTACAGAGATG |
| PSMB5 | RNA0216_gPSMB5_005 | 1530 | CTCTGATCTTAACAGTTCCGC |
| PSMB5 | RNA0217_gPSMB5_006 | 1531 | GAAGCTCATAGATTCGACATT |
| PSMB5 | RNA0218_gPSMB5_011 | 1532 | AGGGGCCACCTTCTCTGTAGG |
| PSMB5 | RNA0219_gPSMB5_012 | 1533 | AGGGGGTAGAGCCACTATACT |
| PSMB5 | RNA0220_gPSMB5_010 | 1534 | CAGGCCTCTACTACGTGGACA |
| PSMB5 | RNA0221_gPSMB5_002 | 1535 | GGACTTGGGGGTCGTGCAGAT |
| PSMB5 | RNA0222_gPSMB5_001 | 1536 | TGCCCACACTAGACATGGCGC |
| PSMB5 | RNA0223_gPSMB5_003 | 1537 | GATTCCTGGCTCTTCTGGGAC |
| PSMB5 | RNA0224_gPSMB5_008 | 1538 | TACTGATACACCATGTTGGCA |
| PSMB8 | RNA0155_gPSMB8_011 | 1478 | CTGAGAGCCGAGTCCCATGTT |
| PSMB8 | RNA0156_gPSMB8_001 | 1479 | TCTATGCGATCTCCAGAGCTC |
| PSMB8 | RNA0157_gPSMB8_004 | 1480 | TCTTATCAGCCCACAGAATTC |
| PSMB8 | RNA0158_gPSMB8_014 | 1481 | TCCACAGTGTACCACATGAAG |
| PSMB8 | RNA0159_gPSMB8_010 | 1482 | ATCTTATAGGGTCCTGGACTC |
| PSMB8 | RNA0160_gPSMB8_013 | 1483 | ACCCAACCATCTTCCTTCATG |
| PSMB8 | RNA0161_gPSMB8_008 | 1484 | AGTGTCGGCAGCCTCCAAGCT |
| PSMB8 | RNA0162_gPSMB8_015 | 1485 | TACTTTCACCCAACCATCTTC |
| PSMB8 | RNA0163_gPSMB8_012 | 1486 | TCATTTGTCCACAGTGTACCA |
| PSMB8 | RNA0164_gPSMB8_005 | 1487 | TCCGTCCCCACCCAGGGACTG |
| PSMB9 | RNA0145_gPSMB9_010 | 1468 | GGAGAAACTCACCTGACCTCC |
| PSMB9 | RNA0146_gPSMB9_011 | 1469 | ACCTGAGGATCCCTTTCCCAG |
| PSMB9 | RNA0147_gPSMB9_005 | 1470 | CCTCAGGATAGAACTGGAGGA |
| PSMB9 | RNA0148_gPSMB9_009 | 1471 | GCTGCTGCAAATGTGGTGAGA |
| PSMB9 | RNA0149_gPSMB9_012 | 1472 | CCAGGTATATGGAACCCTGGG |
| PSMB9 | RNA0150_gPSMB9_015 | 1473 | GCAGTTCATTGCCCAAGATGA |
| PSMB9 | RNA0151_gPSMB9_007 | 1474 | TCACCACATTTGCAGCAGCCA |
| PSMB9 | RNA0152_gPSMB9_001 | 1475 | ACGGGGGCGTTGTGATGGGTT |
| PSMB9 | RNA0153_gPSMB9_014 | 1476 | TCTATGGTTATGTGGATGCAG |
| PSMB9 | RNA0154_gPSMB9_002 | 1477 | CTCACCCTGCAGACACTCGGG |
| PTCD2 | RNA0324_gPTCD2_018 | 1638 | ATTACCAGGTACCATGCAGAG |
| PTCD2 | RNA0325_gPTCD2_043 | 1639 | GCTGTGGCATTAGCTCTGAAT |
| PTCD2 | RNA0326_gPTCD2_042 | 1640 | CCTGATTCAGAGCTAATGCCA |
| PTCD2 | RNA0327_gPTCD2_011 | 1641 | GTGCCAGAAAGATTACATGCA |
| PTCD2 | RNA0328_gPTCD2_033 | 1642 | GCAGGTGCTTTGCAAGTATTG |
| PTCD2 | RNA0329_gPTCD2_064 | 1643 | ATAGCAACGTGTGAGATTTCC |
| PTCD2 | RNA0330_gPTCD2_032 | 1644 | ATCTCTATCAATACTTGCAAA |
| PTCD2 | RNA0331_gPTCD2_007 | 1645 | GCTAAAAGATACCTACTTACA |
| PTCD2 | RNA0332_gPTCD2_026 | 1646 | TTCTCAGACTCCACATCATTC |
| PTCD2 | RNA0333_gPTCD2_005 | 1647 | ACCACATTATCTGTAAGTAGG |
| RFX5 | RNA0165_gRFX5_028 | 1488 | GCATCACTTGCTGTATCCTCT |
| RFX5 | RNA0166_gRFX5_015 | 1489 | GTACTTACACTCTCAGAACCC |
| RFX5 | RNA0167_gRFX5_018 | 1490 | GATGACCGTTCCCGAGGTGCA |
| RFX5 | RNA0168_gRFX5_008 | 1491 | TGTAGCTCAGAGCCAAGTACA |
| RFX5 | RNA0169_gRFX5_017 | 1492 | GTACCTCTGCAGAAGAGGACG |
| RFX5 | RNA0170_gRFX5_016 | 1493 | AGGATCCGCTCTGCCCAGTCA |
| RFX5 | RNA0171_gRFX5_026 | 1494 | GCTGGTGGAGCCTGCCCACTG |
| RFX5 | RNA0172_gRFX5_013 | 1495 | ACTTGCATCAGATATTGCTAC |
| RFX5 | RNA0173_gRFX5_012 | 1496 | GCAAGATCATCAGAGAGATCT |
| RFX5 | RNA0174_gRFX5_038 | 1497 | GCTTCTGCTGCCCTTGATGAC |
| RFXAP | RNA0175_gRFXAP_016 | 1498 | GAACAAGTGTTAAATCAAAAA |
| REXAP | RNA0176_gRFXAP_012 | 1499 | GGGATCGTCCTGCAAGACCTA |
| REXAP | RNA0177_gRFXAP_025 | 1500 | GAGCAAAGACAACAGCAGTTT |
| RFXAP | RNA0178_gRFXAP_021 | 1501 | TGTAAAAATTGCACTACTTCT |
| REXAP | RNA0179_gRFXAP_023 | 1502 | CAGAAACAGCAACAGCTATTA |
| REXAP | RNA0180_gRFXAP_001 | 1503 | GAGGATCTAGAGGACGAGGAG |
| REXAP | RNA0181_gRFXAP_009 | 1504 | ACAATGGAGAGTATGTTATCT |
| REXAP | RNA0182_gRFXAP_005 | 1505 | CCGCGCTGCCAGTCGAGGCAG |
| REXAP | RNA0183_gRFXAP_020 | 1506 | TAAGTCGTTACTAAGAAGTCC |
| RFXAP | RNA0184_gRFXAP_004 | 1507 | TACTTGTCCTTGTACATCTTG |
| RPL23 | RNA0314_gRPL23_003 | 1628 | GCACCAGAGGACCCACCACGT |
| RPL23 | RNA0315_gRPL23_025 | 1629 | ATGCAGGTTCTGCCATTACAG |
| RPL23 | RNA0316_gRPL23_019 | 1630 | AAGATAATGCAGGAGTCATAG |
| RPL23 | RNA0317_gRPL23_008 | 1631 | TAGGAGCCAAAAACCTGTATA |
| RPL23 | RNA0318_gRPL23_027 | 1632 | CCTTCCCTTTATATCCACAGG |
| RPL23 | RNA0319_gRPL23_021 | 1633 | CTACCTTTCATCTCGCCTTTA |
| RPL23 | RNA0320_gRPL23_026 | 1634 | CAAATATACTGGAGAATCATG |
| RPL23 | RNA0321_gRPL23_014 | 1635 | TTCTCTCAGTACATCCAGCAG |
| RPL23 | RNA0322_gRPL23_013 | 1636 | GTTGTCGAATGACCACTGCTG |
| RPL23 | RNA0323_gRPL23_004 | 1637 | TATCCACAGGACGTGGTGGGT |
| RFXANK | RNA0185_gRFXANK_007 | 1508 | TCCTGCCCCTACCCACGACAG |
| REXANK | RNA0186_gRFXANK_011 | 1509 | CCTGCCCCATCTCAGTGCAAC |
| RFXANK | RNA0187_gRFXANK_005 | 1510 | GAGAGATTGAGACCGTTCGCT |
| RFXANK | RNA0188_gRFXANK_002 | 1511 | CCTGCACCCCTGAGCCTGTGA |
| RFXANK | RNA0189_gRFXANK_001 | 1512 | CCCATGGAGCTTACCCAGCCT |
| REXANK | RNA0190_gRFXANK_008 | 1513 | ACGTGGTTCCCGCGCACAGCG |
| REXANK | RNA0191_gRFXANK_003 | 1514 | CCAGCAGGCAGCTCCCTGAAG |
| REXANK | RNA0192_gRFXANK_010 | 1515 | CGGTATCCCAGGGCCACGGCA |
| REXANK | RNA0193_gRFXANK_006 | 1516 | CCAGGATGTGGGGGTCGGCAC |
| REXANK | RNA0194_gRFXANK_009 | 1517 | CAGCCCGAGGCGCTGACCTCA |
| SOX10 | RNA0308_gSOX10_005 | 1622 | ACTACTCTGACCATCAGCCCT |
| SOX10 | RNA0309_gSOX10_006 | 1623 | GGGCCGGGACAGTGTCGTATA |
| SOX10 | RNA0310_gSOX10_004 | 1624 | GCATCCACACCAGGTGGTGAG |
| SOX10 | RNA0311_gSOX10_001 | 1625 | CTGGCGCCGTTGACGCGCACG |
| SOX10 | RNA0312_gSOX10_003 | 1626 | ATGTGGCTGAGTTGGACCAGT |
| SOX10 | RNA0313_gSOX10_002 | 1627 | TTGTGCTGCATACGGAGCCGC |
| SRP54 | RNA0334_gSRP54_139 | 1648 | AGGATAACTAACCAAGATCTG |
| SRP54 | RNA0335_gSRP54_020 | 1649 | GTGGGTGTCCATGCCTTAACT |
| SRP54 | RNA0336_gSRP54_087 | 1650 | GCACCATCCGTACTGTCTAGT |
| SRP54 | RNA0337_gSRP54_064 | 1651 | ATTGGTACAGGGGAACATATA |
| SRP54 | RNA0338_gSRP54_030 | 1652 | ATATGTGCAGACACATTCAGA |
| SRP54 | RNA0339_gSRP54_096 | 1653 | CCCTCAGGTGGCGACATGTCT |
| SRP54 | RNA0340_gSRP54_011 | 1654 | TCTTAGTTGCTTCACTAGTTT |
| SRP54 | RNA0341_gSRP54_029 | 1655 | TCACCCAGCTAGCATATTATT |
| SRP54 | RNA0342_gSRP54_024 | 1656 | CCACTCCCTTGCAATCCAACA |
| SRP54 | RNA0343_gSRP54_021 | 1657 | GCTTGTAGACCCTGGAGTTAA |
| SRP54 | RNA0344_gSRP54_090 | 1658 | GTAAACAACCAGGAAGAATCC |
| STAT1 | RNA0405_gSTAT1_102 | 1719 | CCTGACATCATTCGCAATTAC |
| STAT1 | RNA0406_gSTAT1_113 | 1720 | GTCACCCTTCTAGACTTCAGA |
| STAT1 | RNA0407_gSTAT1_013 | 1721 | TTCTAACCACTCAAATCTAGG |
| STAT1 | RNA0408_gSTAT1_014 | 1722 | AGGAAGACCCAATCCAGATGT |
| STAT1 | RNA0409_gSTAT1_003 | 1723 | CATGGGAAAACTGTCATCATA |
| STAT1 | RNA0410_gSTAT1_103 | 1724 | GATACAGATACTTCAGGGGAT |
| STAT1 | RNA0411_gSTAT1_005 | 1725 | TAACCACTGTGCCAGGTACTG |
| STAT1 | RNA0412_gSTAT1_026 | 1726 | TAGTGTATAGAGCATGAAATC |
| STAT1 | RNA0413_gSTAT1_032 | 1727 | TGATCACTCTTTGCCACACCA |
| STAT1 | RNA0414_gSTAT1_009 | 1728 | ATGACCTCCTGTCACAGCTGG |
| Tap1 | RNA0111_gTap1_026 | 1436 | GGGAAAAGCTGCAAGAAATAA |
| Tap1 | RNA0112_gTap1_035 | 1437 | GGTAGGCAAAGGAGACATCTT |
| Tap1 | RNA0113_gTap1_039 | 1438 | GAAGAAGTCTTCAAGAAAATA |
| Tap1 | RNA0114_gTap1_033 | 1439 | TCTGAGGAGCCCACAGCCTTC |
| Tap1 | RNA0115_gTap1_016 | 1440 | AGGAGAAACCTGTCTGGTTCT |
| Tap1 | RNA0116_gTap1_011 | 1441 | GAGTGAAGGTATCGGCTGAGC |
| Tap1 | RNA0117_gTap1_036 | 1442 | CCTACCCAAACCGCCCAGATG |
| Tap1 | RNA0118_gTap1_020 | 1443 | CTTCTGCCCAAGAAGGTGGGA |
| Tap1 | RNA0119_gTap1_030 | 1444 | AGGTATGCTGCTGAAAGTGGG |
| Tap1 | RNA0120_gTap1_012 | 1445 | AGCCCCCAGACCTGGCTATGG |
| TAP2 | RNA0121_gTAP2_014 | 1446 | AAGGAAGCCAGTTACTCATCA |
| TAP2 | RNA0122_gTAP2_004 | 1447 | GCAGCCCCCACAGCCCTCCCA |
| TAP2 | RNA0123_gTAP2_027 | 1448 | CAGACCCTGGTATACATATAT |
| TAP2 | RNA0124_gTAP2_028 | 1449 | GCTGTCGGTCCATGTAGGAGA |
| TAP2 | RNA0125_gTAP2_029 | 1450 | TCCTACATGGACCGACAGCCA |
| TAP2 | RNA0126_gTAP2_008 | 1451 | AGGTGAGACATTAATCCCTCA |
| TAP2 | RNA0127_gTAP2_037 | 1452 | ATCCAGCAGCACCTGTCCCCC |
| TAP2 | RNA0128_gTAP2_030 | 1453 | ACAACCCCCTGCAGAGTGGTG |
| TAP2 | RNA0129_gTAP2_038 | 1454 | AGTTGGGCAGGAGCCTGTGCT |
| TAP2 | RNA0130_gTAP2_040 | 1455 | TAGAAGATACCTGTGTATATT |
| TAPBP | RNA0131_gTAPBP_016 | 1456 | CCCACAGCTGTCTACCTGTCC |
| TAPBP | RNA0132_gTAPBP_011 | 1457 | CCCAGAACCCCCCAAAGTGTC |
| TAPBP | RNA0133_gTAPBP_007 | 1458 | AGGAGGGCACCTATCIGGCCA |
| TAPBP | RNA0134_gTAPBP_003 | 1459 | CCTACATGCCCCCCACCTCCG |
| TAPBP | RNA0135_gTAPBP_004 | 1460 | GGCTAGAGTGGCGACGCCAGC |
| TAPBP | RNA0136_gTAPBP_001 | 1461 | CGCTCGCATCCTCCACGAACC |
| TAPBP | RNA0137_gTAPBP_002 | 1462 | GCAGAGGCGGGGAGAGGCACG |
| TAPBP | RNA0138_gTAPBP_013 | 1463 | CTGTCTGCCTTTCTTCTGCTT |
| TAPBP | RNA0139_gTAPBP_010 | 1464 | GTCCTCTTTCCCCAGAACCCC |
| TAPBP | RNA0140_gTAPBP_012 | 1465 | AGGGCCCTCCCTTGAGGACAG |
| TGFBR2 | RNA0452_gTGFBR2_001 | 1766 | GATCTCTTTCCCGCTACAGGG |
| TGFBR2 | RNA0453_gTGFBR2_002 | 1767 | CCGCTACAGGGCATCCAGATG |
| TGFBR2 | RNA0454_gTGFBR2_003 | 1768 | GGGAGCCGTCTTCAGGAATCT |
| TGFBR2 | RNA0455_gTGFBR2_004 | 1769 | GTAGTGTTTAGGGAGCCGTCT |
| TGFBR2 | RNA0456_gTGFBR2_005 | 1770 | CTATAGGTGGGAACTGCAAGA |
| TGFBR2 | RNA0457_gTGFBR2_006 | 1771 | GAGAATGTTGAGTCCTTCAAG |
| TGFBR2 | RNA0458_gTGFBR2_007 | 1772 | CCAGAGCACCAGAGCCATGGA |
| TGFBR2 | RNA0459_gTGFBR2_008 | 1773 | CCAGGTTGAACTCAGCTTCTG |
| TGFBR2 | RNA0460_gTGFBR2_009 | 1774 | CCCACCAGGGTGTCCAGCTCA |
| TGFBR2 | RNA0461_gTGFBR2_010 | 1775 | CTGAGGTCTATAAGGCCAAGC |
| TGFBR2 | RNA0462_gTGFBR2_011 | 1776 | AGACAGTGGCAGTCAAGATCT |
| TGFBR2 | RNA0463_gTGFBR2_012 | 1777 | CCTATGAGGAGTATGCCTCTT |
| TGFBR2 | RNA0464_gTGFBR2_013 | 1778 | CCCAACTCCGTCTTCCGCTCC |
| TGFBR2 | RNA0465_gTGFBR2_014 | 1779 | GGCTTTCCCTGCGTCTGGACC |
| TGFBR2 | RNA0466_gTGFBR2_015 | 1780 | CCTGCGTCTGGACCCTACTCT |
| TWF1 | RNA0285_gTWF1_012 | 1599 | ATAGAGCAACTTGTGATTGGA |
| TWF1 | RNA0286_gTWF1_060 | 1600 | ATGTGATGACTTTAATCAGTA |
| TWF1 | RNA0287_gTWF1_020 | 1601 | GAGGTGGCCACATTAAAGATG |
| TWF1 | RNA0288_gTWF1_053 | 1602 | TGAAGAAGTACATCCCAAGCA |
| TWF1 | RNA0289_gTWF1_101 | 1603 | AAATAGGTGGGCTACCTTTCT |
| TWF1 | RNA0290_gTWF1_018 | 1604 | ATGTGGCCACCTCCAAATTCC |
| TWF1 | RNA0291_gTWF1_022 | 1605 | ATCTGTCGTAGTTCTTCCTCA |
| TWF1 | RNA0292_gTWF1_015 | 1606 | CCCCTGTTGGAGGACAAACAA |
| TWF1 | RNA0293_gTWF1_005 | 1607 | CACAGCAAGTGAAGATGTTAA |
| TWF1 | RNA0294_gTWF1_051 | 1608 | CAGATCGAGATAGACAATGGG |

TABLE 7
Selected spacer sequences targeting human genes

| Target Gene | Name | SEQ ID NO | Spacer Sequence |
|---|---|---|---|
| ADORA2A | gADORA2A_12 | 983 | AGGATGTGGTCCCCATGAACT |
| B2M | gB2M_41 | 1302 | ATAGATCGAGACATGTAAGCA |
| CARD11 | gCARD11_1 | 1388 | TAGTACCGCTCCTGGAAGGTT |
| CD247 | gCD247_12 | 89 | CTAGCAGAGAAGGAAGAACCC |
| CD52 | gCD52_1 | 985 | CTCTTCCTCCTACTCACCATC |
| CIITA | gCIITA_32 | 1303 | CCTTGGGGCTCTGACAGGTAG |
| CTLA4 | gCTLA4_4 | 116 | AGCGGCACAAGGCTCAGCTGA |
| DCK | gDCK_6 | 1433 | CGGAGGCTCCTTACCGATGTT |
| FAS | gFAS_36 | 987 | GTGTTGCTGGTGAGTGTGCAT |
| HAVCR2 | gTIM3_6 | 333 | CTTGTAAGTAGTAGCAGCAGC |
| IL7R | gIL7R_3 | 1393 | CAGGGGAGATGGATCCTATCT |
| LAG3 | gLAG3_6 | 153 | GGGTGCATACCTGTCTGGCTG |
| LCK | gLCK1_3 | 1401 | ACCCATCAACCCGTAGGGATG |
| PDCD1 | gPD_23 | 210 | TCTGCAGGGACAATAGGAGCC |
| PLCG1 | gPLCG1_2 | 1403 | CCTTTCTGCGCTTCGTGGTGT |
| PTPN6 | gPTPN6_6 | 249 | TATGACCTGTATGGAGGGGAG |
| TIGIT | gTIGIT_2 | 302 | AGGCCTTACCTGAGGCGAGGG |
| TRAC | gTRAC006 | 988 | TGAGGGTGAAGGATAGACGCT |
| TRBC1 + 2 | gTRBC1 + 2_3 | 1373 | CGCTGTCAAGTCCAGTTCTAC |
| TRBC2 | gTRBC2_12 | 1379 | CCGGAGGTGAAGCCACAGTCT |

TABLE 8
Selected spacer sequences targeting human genes

| Target Gene | Name | SEQ ID NO | Spacer Sequence |
|---|---|---|---|
| ADORA2A | gADORA2A_12 | 983 | AGGATGTGGTCCCCATGAACT |
| B2M | gB2M_7 | 989 | ACTTTCCATTCTCTGCTGGAT |
| B2M | gB2M_30 | 1292 | AGTGGGGGTGAATTCAGTGTA |
| B2M | gB2M_41 | 1302 | ATAGATCGAGACATGTAAGCA |
| B2M | gB2M_4 | 984 | CTCACGTCATCCAGCAGAGAA |
| B2M | gB2M_17 | 991 | TATCTCTTGTACTACACTGAA |
| B2M | gB2M_2 | 990 | TGGCCTGGAGGCTATCCAGCG |
| CD247 | gCD247_19 | 99 | ACTCCCAAACAACCAGCGCCG |
| CD247 | gCD247_15 | 95 | ATCCCAATCTCACTGTAGGCC |
| CD247 | gCD247_3 | 105 | CGGAGGGTCTACGGCGAGGCT |
| CD247 | gCD247_12 | 89 | CTAGCAGAGAAGGAAGAACCC |
| CD247 | gCD247_8 | 110 | GACAAGAGACGTGGCCGGGAC |
| CD247 | gCD247_18 | 98 | TCATTTCACTCCCAAACAACC |
| CD247 | gCD247_1 | 90 | TGTGTTGCAGTTCAGCAGGAG |
| CD247 | gCD247_4 | 106 | TTATCTGTTATAGGAGCTCAA |
| CD3E | gCD3E_24 | 1795 | AGATCCAGGATACTGAGGGCA |
| CD3E | gCD3E_34 | 1796 | CTTCCTCTGGGGTAGCAGACA |
| CD40LG | gCD40LG_40 | 1798 | CTGCTGGCCTCACTTATGACA |
| CD52 | gCD52_1 | 985 | CTCTTCCTCCTACTCACCATC |
| CIITA | gCIITA_71 | 1341 | AAAGCCAAGTCCCTGAAGGAT |
| CIITA | gCIITA_33 | 1304 | ACCTTGGGGCTCTGACAGGTA |
| CIITA | gCIITA_59 | 1329 | AGAGCTCAGGGATGACAGAGC |
| CIITA | gCIITA_80 | 1349 | CAAGGACTTCAGCTGGGGGAA |
| CIITA | gCIITA_57 | 1327 | CAGAAGAAGCTGCTCCGAGGT |
| CIITA | gCIITA_70 | 1340 | CCAGGTCTTCCACATCCTTCA |
| CIITA | gCIITA_32 | 1303 | CCTTGGGGCTCTGACAGGTAG |
| CIITA | gCIITA_82 | 1351 | CGACAGCTTGTACAATAACTG |
| CIITA | gCIITA_35 | 1306 | CTCCCAGAACCCGACACAGAC |
| CIITA | gCIITA_48 | 1319 | CTCGGGAGGTCAGGGCAGGTT |
| CIITA | gCIITA_38 | 1309 | CTTGTCTGGGCAGCGGAACTG |
| CIITA | gCIITA_65 | 1335 | GCAGCACGTGGTACAGGAGCT |
| CIITA | gCIITA_63 | 1333 | GCCACTCAGAGCCAGCCACAG |
| CIITA | gCIITA_76 | 1346 | GGGAAAGCCTGGGGGCCTGAG |
| CITTA | gCIITA_72 | 1342 | GGTCCCGAACAGCAGGGAGCT |
| CIITA | gCIITA_81 | 1350 | TAGGCACCCAGGTCAGTGATG |
| CIITA | gCIITA_4 | 986 | TAGGGGCCCCAACTCCATGGT |
| CIITA | gCIITA_40 | 1311 | TCAAAGTAGAGCACATAGGAC |
| CIITA | gCIITA_44 | 1315 | TCCAGGCGCATCTGGCCGGAG |
| CIITA | gCIITA_43 | 1314 | TCTGCAGCCTTCCCAGAGGAG |
| CIITA | gCIITA_41 | 1312 | TGCCCAACTTCTGCTGGCATC |
| CIITA | gCIITA_60 | 1330 | TGCCGGGCAGTGTGCCAGCTC |
| CIITA | gCIITA_67 | 1337 | TGGGCACCCGCCTCACGCCTC |
| CIITA | gCIITA_36 | 1307 | TGGGCTCAGGTGCTTCCTCAC |
| CIITA | gCIITA_73 | 1343 | TTTAGGTCCCGAACAGCAGGG |
| CSF2 | gCSF2_007 | 1797 | CACAGGAGCCGACCTGCCTAC |
| CTLA4 | gCTLA4_4 | 116 | AGCGGCACAAGGCTCAGCTGA |
| CTLA4 | gCTLA4_19 | 114 | CACTGGAGGTGCCCGTGCAGA |
| CTLA4 | gCTLA4_6 | 113 | CAGAAGACAGGGATGAAGAGA |
| CTLA4 | gCTLA4_14 | 112 | CCTGGAGATGCATACTCACAC |
| CTLA4 | gCTLA4_13 | 115 | TGTGTGAGTATGCATCTCCAG |
| DCK | gDCK_26 | 994 | AGCTTGCCATTCAGAGAGGCA |
| DCK | gDCK_6 | 1433 | CGGAGGCTCCTTACCGATGTT |
| DCK | gDCK_8 | 993 | CTCACAACAGCTGCAGGGAAG |
| DCK | gDCK_30 | 995 | TACATACCTGTCACTATACAC |
| DCK | gDCK_2 | 992 | TCAGCCAGCTCTGAGGGGACC |
| FAS | gFAS_35 | 997 | ATGATTCCATGTTCACATCTA |
| FAS | gFAS_1 | 999 | GGAGGATTGCTCAACAACCAT |
| FAS | gFAS_12 | 998 | GTGTAACATACCTGGAGGACA |
| FAS | gFAS_36 | 987 | GTGTTGCTGGTGAGTGTGCAT |
| FAS | gFAS_59 | 1000 | TAGGAAACAGTGGCAATAAAT |
| FAS | gFAS_34 | 996 | TTTTTCTAGATGTGAACATGG |
| HAVCR2 | gTIM3_12 | 337 | AATGTGGCAACGTGGTGCTCA |
| HAVCR2 | gTIM3_29 | 334 | CAAGGATGCTTACCACCAGGG |
| HAVCR2 | gTIM3_30 | 336 | CCACCAGGGGACATGGCCCAG |
| HAVCR2 | gTIM3_18 | 345 | CGCAAAGGAGATGTGTCCCTG |
| HAVCR2 | gTIM3_6 | 333 | CTTGTAAGTAGTAGCAGCAGC |
| HAVCR2 | gTIM3_6 | 335 | TAAGTAGTAGCAGCAGCAGCA |
| HAVCR2 | gTIM3_32 | 359 | TATCAGGGAGGCTCCCCAGTG |
| HAVCR2 | gTIM3_25 | 353 | TGACATTAGCCAAGGTCACCC |
| IL7R | gIL7R_3 | 1393 | CAGGGGAGATGGATCCTATCT |
| IL7R | gIL7R_8 | 1398 | CATAACACACAGGCCAAGATG |
| LAG3 | gLAG3_6 | 153 | GGGTGCATACCTGTCTGGCTG |
| LAG3 | gLAG3_33 | 154 | GGTCACCTGGATCCCTGGGGA |
| LAG3 | gLAG3_38 | 155 | TCAGGACCTTGGCTGGAGGCA |
| LCK | gLCK1_3 | 1401 | ACCCATCAACCCGTAGGGATG |
| PDCD1 | gPD_27 | 211 | CAGTGGCGAGAGAAGACCCCG |
| PDCD1 | gPD_2 | 224 | CCTTCCGCTCACCTCCGCCTG |
| PDCD1 | gPD_29 | 212 | CTAGCGGAATGGGCACCTCAT |
| PDCD1 | gPD_8 | 209 | GCACGAAGCTCTCCGATGTGT |
| PDCD1 | gPD_23 | 210 | TCTGCAGGGACAATAGGAGCC |
| PTPN6 | gPTPN6_22 | 268 | AAGAAGACGGGGATTGAGGAG |
| PTPN6 | gPTPN6_1 | 254 | ACCGAGACCTCAGTGGGCTGG |
| PTPN6 | gPTPN6_46 | 252 | ACTGCCCCCCACCCAGGCCTG |
| PTPN6 | gPTPN6_26 | 251 | CAGAAGCAGGAGGTGAAGAAC |
| PTPN6 | gPTPN6_25 | 271 | CCCACCCACATCTCAGAGTTT |
| PTPN6 | gPTPN6_7 | 250 | CGACTCTGACAGAGCTGGTGG |
| PTPN6 | gPTPN6_19 | 264 | GCTCCCCCCAGGGTGGACGCT |
| PTPN6 | gPTPN6_14 | 259 | GGCTGGTCACTGAGCACAGAA |
| PTPN6 | gPTPN6_6 | 249 | TATGACCTGTATGGAGGGGAG |
| PTPN6 | gPTPN6_5 | 293 | TCCCCTCCATACAGGTCATAG |
| PTPN6 | gPTPN6_37 | 253 | TGGGCCCTACTCTGTGACCAA |
| PTPN6 | gPTPN6_16 | 261 | TGTGCTCAGTGACCAGCCCAA |
| PTPN6 | gPTPN6_12 | 257 | TTGTGCGTGAGAGCCTCAGCC |
| TIGIT | gTIGIT_2 | 302 | AGGCCTTACCTGAGGCGAGGG |
| TIGIT | gTIGIT_18 | 303 | GTCCTCCCTCTAGTGGCTGAG |
| TRAC | gTRAC079 | 1006 | ATTCCTCCACTTCAACACCTG |
| TRAC | gTRAC017 | 1434 | CAGGTGAAATTCCTGAGATGT |
| TRAC | gTRAC078 | 1002 | CCAGCTCACTAAGTCAGTCTC |
| TRAC | gTRAC082 | 1016 | CCAGCTGACAGATGGGCTCCC |
| TRAC | gTRAC028 | 1022 | CCATGCCTGCCTTTACTCTGC |
| TRAC | gTRAC041 | 1018 | CCCCAACCCAGGCTGGAGTCC |
| TRAC | gTRAC040 | 1017 | CCGTATAAAGCATGAGACCGT |
| TRAC | gTRAC067 | 1005 | CCGTGTCATTCTCTGGACTGC |
| TRAC | gTRAC018 | 1013 | CTCGATATAAGGCCTTGAGCA |
| TRAC | gTRAC029 | 1021 | CTCTGCCAGAGTTATATTGCT |
| TRAC | gTRAC058 | 1009 | CTTGCTTCAGGAATGGCCAGG |
| TRAC | gTRAC059 | 1435 | GACATCATTGACCAGAGCTCT |
| TRAC | gTRAC043 | 1014 | GAGTCTCTCAGCTGGTACACG |
| TRAC | gTRAC073 | 1001 | GCAGACAGGGAGAAATAAGGA |
| TRAC | gTRAC074 | 1012 | GGCAGACAGGGAGAAATAAGG |
| TRAC | gTRAC050 | 1023 | GTCTGTGATATACACATCAGA |
| TRAC | gTRAC061 | 1008 | GTGGCAATGGATAAGGCCGAG |
| TRAC | gTRAC039 | 1004 | TAAGATGCTATTTCCCGTATA |
| TRAC | gTRAC038 | 1007 | TACGGGAAATAGCATCTTAGA |
| TRAC | gTRAC021 | 1010 | TAGTTCAAAACCTCTATCAAT |
| TRAC | gTRAC012 | 1003 | TATGGAGAAGCTCTCATTTCT |
| TRAC | gTRAC014 | 1020 | TCAGAAGAGCCTGGCTAGGAA |
| TRAC | gTRAC049 | 1011 | TCTGTGATATACACATCAGAA |
| TRAC | gTRAC006 | 988 | TGAGGGTGAAGGATAGACGCT |
| TRAC | gTRAC075 | 1015 | TGGCAGACAGGGAGAAATAAG |
| TRAC | gTRAC076 | 1019 | TTGGCAGACAGGGAGAAATAA |
| TRBC1 + 2 | gTRBC1 + 2_1 | 1372 | AGCCATCAGAAGCAGAGATCT |
| TRBC1 + 2 | gTRBC1 + 2_3 | 1373 | CGCTGTCAAGTCCAGTTCTAC |
| TRBC1 + 2 | gTRBC1_3_001 | 1794 | GGTGTGGGAGATCTCTGCTTC |
| TRBC2 | gTRBC2_11 | 1378 | AGACTGTGGCTTCACCTCCGG |
| TRBC2 | gTRBC2_12 | 1379 | CCGGAGGTGAAGCCACAGTCT |
| TRBC2 | gTRBC2_15 | 1382 | CTAGGGAAGGCCACCTTGTAT |
| TRBC2 | gTRBC2_21 | 1387 | GAGCTAGCCTCTGGAATCCTT |

TABLE 9
Selected spacer sequences targeting human genes

| Target Gene | Name | SEQ ID NO | Spacer Sequence |
|---|---|---|---|
| ADORA2A | gADORA2A_28 | 1025 | AAGGCAGCTGGCACCAGTGCC |
| ADORA2A | gADORA2A_4 | 1030 | CCATCACCATCAGCACCGGGT |
| ADORA2A | gADORA2A_8 | 1029 | CCATCGGCCTGACTCCCATGC |
| ADORA2A | gADORA2A_16 | 1024 | CGGATCTTCCTGGCGGCGCGA |
| ADORA2A | gADORA2A_7 | 1028 | GTGACCGGCACGAGGGCTAAG |
| ADORA2A | gADORA2A_2 | 1026 | TGGTGTCACTGGCGGCGGCCG |
| ADORA2A | gADORA2A_23 | 1027 | TTCTGCCCCGACTGCAGCCAC |
| B2M | gB2M_27 | 1289 | AATTCTCTCTCCATTCTTCAG |
| B2M | gB2M_10 | 1036 | ATCCATCCGACATTGAAGTTG |
| B2M | gB2M_31 | 1293 | CAGTGGGGGTGAATTCAGTGT |
| B2M | gB2M_40 | 1301 | CATAGATCGAGACATGTAAGC |
| B2M | gB2M_5 | 1035 | CATTCTCTGCTGGATGACGTG |
| B2M | gB2M_22 | 1037 | CCCCACTTAACTATCTTGGGC |
| B2M | gB2M_11 | 1033 | CTGAAGAATGGAGAGAGAATT |
| B2M | gB2M_8 | 1032 | CTGAATTGCTATGTGTCTGGG |
| B2M | gB2M_1 | 1038 | GCTGTGCTCGCGCTACTCTCT |
| B2M | gB2M_21 | 1031 | TCACAGCCCAAGATAGTTAAG |
| B2M | gB2M_18 | 1034 | TCAGTGGGGGTGAATTCAGTG |
| CD247 | gCD247_7 | 109 | CCCCCATCTCAGGGTCCCGGC |
| CD247 | gCD247_22 | 103 | CTTTCACGCCAGGGTCTCAGT |
| CD247 | gCD247_9 | 111 | TCTCCCTCTAACGTCTTCCCG |
| CD247 | gCD247_21 | 102 | TGATTTGCTTTCACGCCAGGG |
| CD247 | gCD247_14 | 94 | TGCAGGAACTGCAGAAAGATA |
| CD247 | gCD247_13 | 93 | TGCAGTTCCTGCAGAAGAGGG |
| CD52 | gCD52_4 | 1039 | GCTGGTGTCGTTTTGTCCTGA |
| CIITA | gCIITA_55 | 1325 | AGCCACATCTTGAAGAGACCT |
| CIITA | gCIITA_58 | 1328 | AGCTGTCCGGCTTCTCCATGG |
| CIITA | gCIITA_51 | 1322 | CAGAGCCGGTGGAGCAGTTCT |
| CIITA | gCIITA_46 | 1317 | CCAGAGCCCATGGGGCAGAGT |
| CIITA | gCIITA_52 | 1323 | CCCAGCACAGCAATCACTCGT |
| CIITA | gCIITA_68 | 1338 | CCCCTCTGGATTGGGGAGCCT |
| CIITA | gCIITA_34 | 1305 | CCGGCCTTTTTACCTTGGGGC |
| CIITA | gCIITA_75 | 1345 | CCTCCTAGGCTGGGCCCTGTC |
| CIITA | gCIITA_29 | 1041 | GTCTCTTGCAGTGCCTTTCTC |
| CIITA | gCIITA_47 | 1318 | TCCCCACCATCTCCACTCTGC |
| CIITA | gCIITA_83 | 1352 | TCTTGCCAGCGTCCAGTACAA |
| CIITA | gCIITA_42 | 1313 | TGACTTTTCTGCCCAACTTCT |
| CIITA | gCIITA_18 | 1040 | TGCTGGCATCTCCATACTCTC |
| CTLA4 | gCTLA4_36 | 143 | ACAGCTAAAGAAAAGAAGCCC |
| CTLA4 | gCTLA4_37 | 144 | CACATAGACCCCTGTTGTAAG |
| CTLA4 | gCTLA4_18 | 124 | CTAGATGATTCCATCTGCACG |
| CTLA4 | gCTLA4_28 | 134 | CTCCTCTGGATCCTTGCAGCA |
| CTLA4 | gCTLA4_27 | 133 | CTGTTGCAGATCCAGAACCGT |
| CTLA4 | gCTLA4_41 | 148 | TCAATTGATGGGAATAAAATA |
| CTLA4 | gCTLA4_5 | 149 | TTCTTCTCTTCATCCCTGTCT |
| DCK | gDCK_9 | 1042 | AGGATATTCACAAATGTTGAC |
| DCK | gDCK_7 | 1045 | ATCTTTCCTCACAACAGCTGC |
| DCK | gDCK_22 | 1043 | GAAGGTAAAAGACCATCGTTC |
| DCK | gDCK_21 | 1044 | TCATACATCATCTGAAGAACA |
| FAS | gFAS_4 | 1058 | ACAGGTTCTTACGTCTGTTGC |
| FAS | gFAS_47 | 1046 | AGTGAAGAGAAAGGAAGTACA |
| FAS | gFAS_25 | 1048 | CTAGGCTTAGAAGTGGAAATA |
| FAS | gFAS_38 | 1056 | CTCTTTGCACTTGGTGTTGCT |
| FAS | gFAS_71 | 1055 | CTGTTCTGCTGTGTCTTGGAC |
| FAS | gFAS_33 | 1054 | CTTGGTGCAAGGGTCACAGTG |
| FAS | gFAS_10 | 1049 | GAAGGCCTGCATCATGATGGC |
| FAS | gFAS_5 | 1051 | GGACGATAATCTAGCAACAGA |
| FAS | gFAS_15 | 1059 | GGCAGGTGAAAGGAAAGCTAG |
| FAS | gFAS_32 | 1050 | GTGCAAGGGTCACAGTGTTCA |
| FAS | gFAS_29 | 1053 | GTTTACATCTGCACTTGGTAT |
| FAS | gFAS_70 | 1057 | TGTTCTGCTGTGTCTTGGACA |
| FAS | gFAS_14 | 1052 | TTCCTTGGGCAGGTGAAAGGA |
| FAS | gFAS_45 | 1047 | TTTGTTCTTTCAGTGAAGAGA |
| HAVCR2 | gTIM3_23 | 351 | ACCTGAAGTTGGTCATCAAAC |
| HAVCR2 | gTIM3_27 | 355 | ACTGCAGCCTTTCCAAGGATG |
| HAVCR2 | gTIM3_13 | 340 | ATCAGTCCTGAGCACCACGTT |
| HAVCR2 | gTIM3_28 | 356 | CCAAGGATGCTTACCACCAGG |
| HAVCR2 | gTIM3_48 | 376 | CCAATCCTGAGGGAGGGAGGT |
| HAVCR2 | gTIM3_10 | 383 | CCCCAGCAGACGGGCACGAGG |
| HAVCR2 | gTIM3_41 | 369 | CCCCTTACTAGGGTATTCTCA |
| HAVCR2 | gTIM3_36 | 363 | CGGGACTCTGGAGCAACCATC |
| HAVCR2 | gTIM3_42 | 370 | CTAGGGTATTCTCATAGCAAA |
| HAVCR2 | gTIM3_19 | 346 | GATCCGGCAGCAGTAGATCCC |
| HAVCR2 | gTIM3_47 | 375 | GCCAACCTCCCTCCCTCAGGA |
| HAVCR2 | gTIM3_15 | 342 | GCCAGTATCTGGATGTCCAAT |
| HAVCR2 | gTIM3_40 | 367 | GTTTCCCCCTTACTAGGGTAT |
| HAVCR2 | gTIM3_34 | 361 | TGTTTCCATAGCAAATATCCA |
| IL7R | gIL7R_2 | 1392 | CCAGGGGAGATGGATCCTATC |
| IL7R | gIL7R_7 | 1397 | TCTGTCGCTCTGTTGGTCATC |
| LAG3 | gLAG3_3 | 180 | ACCTGGAGCCACCCAAAGCGG |
| LAG3 | gLAG3_27 | 177 | CCACCTGAGGCTGACCTGTGA |
| LAG3 | gLAG3_41 | 156 | CCAGCCTTGGCAATGCCAGCT |
| LAG3 | gLAG3_31 | 182 | CCCAGGGATCCAGGTGACCCA |
| LAG3 | gLAG3_25 | 175 | CCCTTCGACTAGAGGATGTGA |
| LAG3 | gLAG3_13 | 162 | CGCTAAGTGGTGATGGGGGGA |
| LAG3 | gLAG3_22 | 172 | GCAGTGAGGAAAGACCGGGTC |
| LAG3 | gLAG3_16 | 165 | GGGCAGGAAGAGGAAGCTTTC |
| LAG3 | gLAG3_46 | 194 | TCCATAGGTGCCCAACGCTCT |
| LAG3 | gLAG3_35 | 157 | TGAGGTGACTCCAGTATCTGG |
| LAG3 | gLAG3_37 | 186 | TGTGGAGCTCTCTGGACACCC |
| PDCD1 | gPD_20 | 225 | CAGAGAGAAGGGCAGAAGTGC |
| PDCD1 | gPD_22 | 227 | GAACTGGCCGGCTGGCCTGGG |
| PDCD1 | gPD_18 | 222 | GTGCCCTTCCAGAGAGAAGGG |
| PLCG1 | gPLCG1_2 | 1403 | CCTTTCTGCGCTTCGTGGTGT |
| PLCG1 | gPLCG1_5 | 1406 | GTGGTGTATGAGGAAGACATG |
| PLCG1 | gPLCG1_4 | 1405 | TGCGCTTCGTGGTGTATGAGG |
| PTPN6 | gPTPN6_48 | 291 | AATGAACTGGGCGATGGCCAC |
| PTPN6 | gPTPN6_8 | 300 | AGGTGGATGATGGTGCCGTCG |
| PTPN6 | gPTPN6_28 | 273 | CACCAGCGTCTGGAAGGGCAG |
| PTPN6 | gPTPN6_39 | 283 | CAGGTCTCCCCGCTGGACAAT |
| PTPN6 | gPTPN6_53 | 295 | CCCCCCTGCACCCGGCTGCAG |
| PTPN6 | gPTPN6_42 | 287 | CTGCCGCTGGTTGATCTGGTC |
| PTPN6 | gPTPN6_41 | 286 | CTGGACCAGATCAACCAGCGG |
| PTPN6 | gPTPN6_4 | 284 | CTGGCTCGGCCCAGTCGCAAG |
| PTPN6 | gPTPN6_20 | 266 | GAGACCTTCGACAGCCTCACG |
| PTPN6 | gPTPN6_40 | 285 | GGGAGACCTGATTCGGGAGAT |
| PTPN6 | gPTPN6_10 | 255 | TCTAGGTGGTACCATGGCCAC |
| PTPN6 | gPTPN6_32 | 277 | TGGCAGATGGCGTGGCAGGAG |
| TIGIT | gTIGIT_27 | 322 | CTCCTGAGGTCACCTTCCACA |
| TIGIT | gTIGIT_11 | 304 | GGGTGGCACATCTCCCCATCC |
| TIGIT | gTIGIT_10 | 306 | TAATGCTGACTTGGGGTGGCA |
| TIGIT | gTIGIT_7 | 305 | TGCAGAGAAAGGTGGCTCTAT |
| TRAC | gTRAC019 | 1070 | AACTATAAATCAGAACACCTG |
| TRAC | gTRAC044 | 1063 | AGAATCAAAATCGGTGAATAG |
| TRAC | gTRAC035 | 1062 | AGGTTTCCTTGAGTGGCAGGC |
| TRAC | gTRAC007 | 1081 | ATAAACTGTAAAGTACCAAAC |
| TRAC | gTRAC030 | 1077 | ATAGGATCTTCTTCAAAACCC |
| TRAC | gTRAC048 | 1071 | ATTCTCAAACAAATGTGTCAC |
| TRAC | gTRAC056 | 1073 | CATGTGCAAACGCCTTCAACA |
| TRAC | gTRAC083 | 1083 | CCCAGCTGACAGATGGGCTCC |
| TRAC | gTRAC072 | 1064 | CCCCTTACTGCTCTTCTAGGC |
| TRAC | gTRAC068 | 1068 | CCCGTGTCATTCTCTGGACTG |
| TRAC | gTRAC042 | 1061 | CCTCTTTGCCCCAACCCAGGC |
| TRAC | gTRAC066 | 1060 | CTAAGAAACAGTGAGCCTTGT |
| TRAC | gTRAC071 | 1075 | CTCAGACTGTTTGCCCCTTAC |
| TRAC | gTRAC025 | 1069 | CTGGGCCTTTTTCCCATGCCT |
| TRAC | gTRAC036 | 1072 | CTTGAGTGGCAGGCCAGGCCT |
| TRAC | gTRAC020 | 1066 | GAACTATAAATCAGAACACCT |
| TRAC | gTRAC033 | 1078 | GAAGAAGATCCTATTAAATAA |
| TRAC | gTRAC084 | 1082 | GACTTTTCCCAGCTGACAGAT |
| TRAC | gTRAC062 | 1065 | GGTGGCAATGGATAAGGCCGA |
| TRAC | gTRAC009 | 1080 | GTACTTTACAGTTTATTAAAT |
| TRAC | gTRAC081 | 1076 | TAATTCCTCCACTTCAACACC |
| TRAC | gTRAC064 | 1074 | TACTAAGAAACAGTGAGCCTT |
| TRAC | gTRAC001 | 1079 | TGTTTTTAATGTGACTCTCAT |
| TRAC | gTRAC013 | 1067 | TTTCTCAGAAGAGCCTGGCTA |
| TRBC2 | gTRBC2_19 | 1386 | CACAGGTCAAGAGAAAGGATT |
| TRBC2 | gTRBC2_14 | 1381 | CCAGCAAGGGGTCCTGTCTGC |
| TRBC2 | gTRBC2_17 | 1384 | CCATGGCCATCAGCACGAGGG |

[0324] The spacer sequences provided in Tables 7-9 are designed based upon identification of target nucleotide sequences associated with a PAM in a given target gene locus, and are selected based upon the editing efficiency detected in human cells. Further exemplary spacer sequences useful in embodiments of the methods and compositions disclosed herein are shown in Table 10.

TABLE 10
Tested crRNAs targeting human genes

| Target | | SEQ | | |
|---|---|---|---|---|
| Gene | Name | ID NO | Spacer Sequence | % Indel |
| ADORA2A | gADORA2A_26 | 1102 | AAAGGTTCTTGCTGCCTCAGG | 0.1 |
| ADORA2A | gADORA2A_13 | 1091 | AACTTCTTTGCCTGTGTGCTG | 0.1 |
| ADORA2A | gADORA2A_28 | 1025 | AAGGCAGCTGGCACCAGTGCC | 5.8 |
| ADORA2A | gADORA2A_21 | 1098 | ACTTTCTTCTGCCCCGACTGC | 0.6 |
| ADORA2A | gADORA2A_29 | 1104 | AGCTCATGGCTAAGGAGCTCC | 0.2 |
| ADORA2A | gADORA2A_17 | 1094 | AGCTGTCGTCGCGCCGCCAGG | 0.1 |
| ADORA2A | gADORA2A_12 | 983 | AGGATGTGGTCCCCATGAACT | 18.2 |
| ADORA2A | gADORA2A_24 | 1100 | ATCTACGCCTACCGTATCCGC | 0 |
| ADORA2A | gADORA2A_27 | 1103 | CAAGGCAGCTGGCACCAGTGC | 0.1 |
| ADORA2A | gADORA2A_4 | 1030 | CCATCACCATCAGCACCGGGT | 2.1 |
| ADORA2A | gADORA2A_8 | 1029 | CCATCGGCCTGACTCCCATGC | 2.2 |
| ADORA2A | gADORA2A_20 | 1097 | CCCTCTGCTGGCTGCCCCTAC | 0.6 |
| ADORA2A | gADORA2A_15 | 1093 | CCTGTGTGCTGGTGCCCCTGC | 1.1 |
| ADORA2A | gADORA2A_25 | 1101 | CGCAAGATCATTCGCAGCCAC | 0.1 |
| ADORA2A | gADORA2A_16 | 1024 | CGGATCTTCCTGGCGGCGCGA | 7.8 |
| ADORA2A | gADORA2A_22 | 1099 | CTTCTGCCCCGACTGCAGCCA | 1 |
| ADORA2A | gADORA2A_19 | 1096 | GCAGCATGGACCTCCTTCTGC | 0.4 |
| ADORA2A | gADORA2A_3 | 1085 | GCCATCACCATCAGCACCGGG | 0.5 |
| ADORA2A | gADORA2A_30 | 1105 | GCCATGAGCTCAAGGGAGTGT | 0.5 |
| ADORA2A | gADORA2A_11 | 1090 | GCCCTCCCCGCAGCCCTGGGA | 1.3 |
| ADORA2A | gADORA2A_6 | 1087 | GCCCTCGTGCCGGTCACCAAG | 0.9 |
| ADORA2A | gADORA2A_9 | 1088 | GCTGACCGCAGTTGTTCCAAC | 1.1 |
| ADORA2A | gADORA2A_10 | 1089 | GGCTGACCGCAGTTGTTCCAA | 0.5 |
| ADORA2A | gADORA2A_5 | 1086 | GTCCTGGTCCTCACGCAGAGC | 0.1 |
| ADORA2A | gADORA2A_7 | 1028 | GTGACCGGCACGAGGGCTAAG | 2.8 |
| ADORA2A | gADORA2A_1 | 1084 | GTGGTGTCACTGGCGGCGGCC | 0.3 |
| ADORA2A | gADORA2A_18 | 1095 | TGCAGTGTGGACCGTGCCCGC | 0.2 |
| ADORA2A | gADORA2A_2 | 1026 | TGGTGTCACTGGCGGCGGCCG | 3.9 |
| ADORA2A | gADORA2A_23 | 1027 | TTCTGCCCCGACTGCAGCCAC | 2.8 |
| ADORA2A | gADORA2A_14 | 1092 | TTTGCCTGTGTGCTGGTGCCC | 0.2 |
| B2M | gB2M_9 | 1108 | AATGTCGGATGGATGAAACCC | 0.5 |
| B2M | gB2M_27 | 1289 | AATTCTCTCTCCATTCTTCAG | 2.7 |
| B2M | gB2M_19 | 1114 | ACTATCTTGGGCTGTGACAAA | 0.1 |
| B2M | gB2M_7 | 989 | ACTTTCCATTCTCTGCTGGAT | 17.9 |
| B2M | gB2M_16 | 1113 | AGCAAGGACTGGTCTTTCTAT | 0.3 |
| B2M | gB2M_26 | 1288 | AGTAAGTCAACTTCAATGTCG | 0.11 |
| B2M | gB2M_30 | 1292 | AGTGGGGGTGAATTCAGTGTA | 91.96 |
| B2M | gB2M_41 | 1302 | ATAGATCGAGACATGTAAGCA | 93.92 |
| B2M | gB2M_10 | 1036 | ATCCATCCGACATTGAAGTTG | 2 |
| B2M | gB2M_36 | 1297 | CAAAAGAATGTAAGACTTACC | 0.13 |
| B2M | gB2M_28 | 1290 | CAATTCTCTCTCCATTCTTCA | 0.26 |
| B2M | gB2M_29 | 1291 | CAGCAAGGACTGGTCTTTCTA | 0.19 |
| B2M | gB2M_31 | 1293 | CAGTGGGGGTGAATTCAGTGT | 8.1 |
| B2M | gB2M_40 | 1301 | CATAGATCGAGACATGTAAGC | 4.25 |
| B2M | gB2M_5 | 1035 | CATTCTCTGCTGGATGACGTG | 2.2 |
| B2M | gB2M_6 | 1107 | CCATTCTCTGCTGGATGACGT | 1 |
| B2M | gB2M_22 | 1037 | CCCCACTTAACTATCTTGGGC | 2 |
| B2M | gB2M_3 | 1106 | CCCGATATTCCTCAGGTACTC | 0.1 |
| B2M | gB2M_25 | 1287 | CCGATATTCCTCAGGTACTCC | 0.14 |
| B2M | gB2M_37 | 1298 | CCTCCATGATGCTGCTTACAT | 0.81 |
| B2M | gB2M_33 | 1294 | CTATCTCTTGTACTACACTGA | 0.21 |
| B2M | gB2M_4 | 984 | CTCACGTCATCCAGCAGAGAA | 74.1 |
| B2M | gB2M_14 | 1111 | CTGAAAGACAAGTCTGAATGC | 0.4 |
| B2M | gB2M_11 | 1033 | CTGAAGAATGGAGAGAGAATT | 3.4 |
| B2M | gB2M_8 | 1032 | CTGAATTGCTATGTGTCTGGG | 3.5 |
| B2M | gB2M_23 | 1285 | CTGGCCTGGAGGCTATCCAGC | 0.77 |
| B2M | gB2M_1 | 1038 | GCTGTGCTCGCGCTACTCTCT | 1.8 |
| B2M | gB2M_35 | 1296 | GGCTGTGACAAAGTCACATGG | 0.18 |
| B2M | gB2M_20 | 1115 | GTCACAGCCCAAGATAGTTAA | 0.8 |
| B2M | gB2M_34 | 1295 | TACTACACTGAATTCACCCCC | 0.8 |
| B2M | gB2M_17 | 991 | TATCTCTTGTACTACACTGAA | 15.3 |
| B2M | gB2M_12 | 1109 | TCAATTCTCTCTCCATTCTTC | 0.7 |
| B2M | gB2M_21 | 1031 | TCACAGCCCAAGATAGTTAAG | 5.3 |
| B2M | gB2M_18 | 1034 | TCAGTGGGGGTGAATTCAGTG | 3 |
| B2M | gB2M_39 | 1300 | TCATAGATCGAGACATGTAAG | 0.2 |
| B2M | gB2M_24 | 1286 | TCCCGATATTCCTCAGGTACT | 0.54 |
| B2M | gB2M_15 | 1112 | TCTTTCAGCAAGGACTGGTCT | 0.9 |
| B2M | gB2M_2 | 990 | TGGCCTGGAGGCTATCCAGCG | 17.4 |
| B2M | gB2M_13 | 1110 | TTCAATTCTCTCTCCATTCTT | 0.7 |
| B2M | gB2M_38 | 1299 | TTCATAGATCGAGACATGTAA | 0.18 |
| CD52 | gCD52_6 | 1119 | CCTTTTCTTCGTGGCCAATGC | 0.2 |
| CD52 | gCD52_1 | 985 | CTCTTCCTCCTACTCACCATC | 28.4 |
| CD52 | gCD52_8 | 1121 | CTTCGTGGCCAATGCCATAAT | 0.15 |
| CD52 | gCD52_4 | 1039 | GCTGGTGTCGTTTTGTCCTGA | 4.1 |
| CD52 | gCD52_3 | 1117 | GTCCTGAGAGTCCAGTTTGTA | N.D. |
| CD52 | gCD52_2 | 1116 | TCCTCCTACAGATACAAACTG | N.D. |
| CD52 | gCD52_7 | 1120 | TCTTCGTGGCCAATGCCATAA | 0.2 |
| CD52 | gCD52_5 | 1118 | TGTTGCTGGATGCTGAGGGGC | 1.1 |
| CIITA | gCIITA_71 | 1341 | AAAGCCAAGTCCCTGAAGGAT | 39.5 |
| CIITA | gCIITA_69 | 1339 | AAAGGCTCGATGGTGAACTTC | 1.17 |
| CIITA | gCIITA_33 | 1304 | ACCTTGGGGCTCTGACAGGTA | 11.83 |
| CIITA | gCIITA_59 | 1329 | AGAGCTCAGGGATGACAGAGC | 16.35 |
| CIITA | gCIITA_55 | 1325 | AGCCACATCTTGAAGAGACCT | 5.71 |
| CIITA | gCIITA_58 | 1328 | AGCTGTCCGGCTTCTCCATGG | 3.25 |
| CIITA | gCIITA_24 | 1143 | AGGTCTGCCGGAAGCTCCTCT | 0.1 |
| CIITA | gCIITA_89 | 1357 | ATCACCTTCCATGTCACACAA | 0.31 |
| CIITA | gCIITA_17 | 1137 | ATCTGGTCCTATGTGCTCTAC | 0.2 |
| CIITA | gCIITA_61 | 1331 | ATGTCTGCGGCCCAGCTCCCA | 1.25 |
| CIITA | gCIITA_80 | 1349 | CAAGGACTTCAGCTGGGGGAA | 87.87 |
| CIITA | gCIITA_57 | 1327 | CAGAAGAAGCTGCTCCGAGGT | 12.02 |
| CIITA | gCIITA_51 | 1322 | CAGAGCCGGTGGAGCAGTTCT | 8.94 |
| CIITA | gCIITA_92 | 1360 | CAGGACTCCCAGCTGGAGGGC | 0.61 |
| CIITA | gCIITA_94 | 1362 | CAGTGCCTTTCTCCAGTTCCT | 0.25 |
| CIITA | gCIITA_25 | 1144 | CAGTGCTTCAGGTCTGCCGGA | 0.2 |
| CIITA | gCIITA_9 | 1129 | CATGTCACACAACAGCCTGCT | 0.1 |
| CIITA | gCIITA_56 | 1326 | CCAGAAGAAGCTGCTCCGAGG | 0.52 |
| CIITA | gCIITA_46 | 1317 | CCAGAGCCCATGGGGCAGAGT | 1.51 |
| CIITA | gCIITA_23 | 1142 | CCAGAGGAGCTTCCGGCAGAC | 0.9 |
| CIITA | gCIITA_70 | 1340 | CCAGGTCTTCCACATCCTTCA | 38.98 |
| CIITA | gCIITA_77 | 1347 | CCCAAACTGGTGCGGATCCTC | 0.57 |
| CIITA | gCIITA_52 | 1323 | CCCAGCACAGCAATCACTCGT | 2.63 |
| CIITA | gCIITA_68 | 1338 | CCCCTCTGGATTGGGGAGCCT | 4.61 |
| CIITA | gCIITA_84 | 1353 | CCCGGCCTTTTTACCTTGGGG | 0.38 |
| CIITA | gCIITA_34 | 1305 | CCGGCCTTTTTACCTTGGGGC | 2.26 |
| CIITA | gCIITA_8 | 1128 | CCTCCCAGAACCCGACACAGA | 0.1 |
| CIITA | gCIITA_85 | 1354 | CCTCCCAGGCAGCTCACAGTG | 0.74 |
| CIITA | gCIITA_75 | 1345 | CCTCCTAGGCTGGGCCCTGTC | 2.78 |
| CIITA | gCIITA_97 | 1365 | CCTGTCATGTTTGCTCGGGAG | 0.27 |
| CIITA | gCIITA_32 | 1303 | CCTTGGGGCTCTGACAGGTAG | 93.85 |
| CIITA | gCIITA_12 | 1132 | CCTTGTCTGGGCAGCGGAACT | 0.4 |
| CIITA | gCIITA_82 | 1351 | CGACAGCTTGTACAATAACTG | 34.37 |
| CIITA | gCIITA_26 | 1145 | CGGCAGACCTGAAGCACTGGA | 0.3 |
| CIITA | gCIITA_39 | 1310 | CTCAAAGTAGAGCACATAGGA | 0.25 |
| CIITA | gCIITA_27 | 1146 | CTCACAGCTGAGCCCCCCACT | 0.4 |
| CIITA | gCIITA_10 | 1130 | CTCACCGATATTGGCATAAGC | 0.1 |
| CIITA | gCIITA_14 | 1134 | CTCAGGCCCTCCAGCTGGGAG | 0.2 |
| CIITA | gCIITA_28 | 1147 | CTCCAGGCGCATCTGGCCGGA | 0.7 |
| CIITA | gCIITA_31 | 1149 | CTCCAGTTCCTCGTTGAGCTG | 0.1 |
| CIITA | gCIITA_35 | 1306 | CTCCCAGAACCCGACACAGAC | 48.7 |
| CIITA | gCIITA_79 | 1348 | CTCCCTGCAGCATCTGGAGTG | 1.12 |
| CIITA | gCIITA_48 | 1319 | CTCGGGAGGTCAGGGCAGGTT | 61.63 |
| CIITA | gCIITA_22 | 1141 | CTCTGCAGCCTTCCCAGAGGA | 0.6 |
| CIITA | gCIITA_15 | 1135 | CTGAAAATGTCCTTGCTCAGG | 0.2 |
| CITTA | gCIITA_21 | 1140 | CTGACTTTTCTGCCCAACTTC | 0.1 |
| CIITA | gCIITA_19 | 1138 | CTGCCCAACTTCTGCTGGCAT | 0.5 |
| CIITA | gCIITA_101 | 1369 | CTGCTGCTCCTCTCCAGCCTG | 0.23 |
| CIITA | gCIITA_66 | 1336 | CTGGGCACCCGCCTCACGCCT | 0.31 |
| CIITA | gCIITA_37 | 1308 | CTGGGCTCAGGTGCTTCCTCA | 0.45 |
| CIITA | gCIITA_74 | 1344 | CTTACGCAAACTCCAGTTTCT | 0.79 |
| CIITA | gCIITA_38 | 1309 | CTTGTCTGGGCAGCGGAACTG | 38.38 |
| CIITA | gCIITA_49 | 1320 | GAAGCTTGTTGGAGACCTCTC | 0.67 |
| CIITA | gCIITA_100 | 1368 | GCAGAGCCGGTGGAGCAGTTC | 0.46 |
| CIITA | gCIITA_65 | 1335 | GCAGCACGTGGTACAGGAGCT | 70.73 |
| CIITA | gCIITA_103 | 1370 | GCAGCCAACAGCACCTCAGCC | 0.22 |
| CIITA | gCIITA_63 | 1333 | GCCACTCAGAGCCAGCCACAG | 35.47 |
| CIITA | gCIITA_62 | 1332 | GCCATCGCCCAGGTCCTCACG | 1.29 |
| CIITA | gCIITA_104 | 1371 | GCCCAGCACAGCAATCACTCG | 0.07 |
| CIITA | gCIITA_96 | 1364 | GCTCCATCAGCCACTGACCTG | 0.29 |
| CIITA | gCIITA_95 | 1363 | GCTGGCCTGGGGCACCTCACC | 0.59 |
| CIITA | gCIITA_50 | 1321 | GGAAGCTTGTTGGAGACCTCT | 0.57 |
| CIITA | gCIITA_76 | 1346 | GGGAAAGCCTGGGGGCCTGAG | 68.93 |
| CIITA | gCIITA_1 | 1122 | GGGCTCTGACAGGTAGGACCC | 0.5 |
| CIITA | gCIITA_72 | 1342 | GGTCCCGAACAGCAGGGAGCT | 89.25 |
| CIITA | gCIITA_29 | 1041 | GTCTCTTGCAGTGCCTTTCTC | 2.4 |
| CIITA | gCIITA_2 | 1123 | TACCTTGGGGCTCTGACAGGT | 0 |
| CIITA | gCIITA_81 | 1350 | TAGGCACCCAGGTCAGTGATG | 44.56 |
| CIITA | gCIITA_4 | 986 | TAGGGGCCCCAACTCCATGGT | 13.5 |
| CIITA | gCIITA_6 | 1126 | TATGACCAGATGGACCTGGCT | 0.2 |
| CIITA | gCIITA_40 | 1311 | TCAAAGTAGAGCACATAGGAC | 15.68 |
| CIITA | gCIITA_87 | 1355 | TCCAGCCAGGTCCATCTGGTC | 0.15 |
| CIITA | gCIITA_44 | 1315 | TCCAGGCGCATCTGGCCGGAG | 39.16 |
| CIITA | gCIITA_45 | 1316 | TCCAGTTCCTCGTTGAGCTGC | 0.22 |
| CIITA | gCIITA_98 | 1366 | TCCATCTCCAGAGCACAAGAC | 0.23 |
| CIITA | gCIITA_47 | 1318 | TCCCCACCATCTCCACTCTGC | 2.05 |
| CIITA | gCIITA_7 | 1127 | TCCTCCCAGAACCCGACACAG | 0.1 |
| CIITA | gCIITA_11 | 1131 | TCCTTGTCTGGGCAGCGGAAC | 0.1 |
| CIITA | gCIITA_16 | 1136 | TCTCAAAGTAGAGCACATAGG | 0.1 |
| CIITA | gCIITA_30 | 1148 | TCTCTTGCAGTGCCTTTCTCC | 0.1 |
| CIITA | gCIITA_93 | 1361 | TCTGACTTTTCTGCCCAACTT | 0.21 |
| CIITA | gCIITA_43 | 1314 | TCTGCAGCCTTCCCAGAGGAG | 55.09 |
| CIITA | gCIITA_20 | 1139 | TCTGCCCAACTTCTGCTGGCA | 0.1 |
| CIITA | gCIITA_13 | 1133 | TCTGGGCAGCGGAACTGGACC | 0.1 |
| CIITA | gCIITA_90 | 1358 | TCTGGGCTCAGGTGCTTCCTC | 0.25 |
| CIITA | gCIITA_53 | 1324 | TCTTCTCTGTCCCCTGCCATT | 0.28 |
| CIITA | gCIITA_83 | 1352 | TCTTGCCAGCGTCCAGTACAA | 5.62 |
| CIITA | gCIITA_42 | 1313 | TGACTTTTCTGCCCAACTTCT | 2.72 |
| CIITA | gCIITA_91 | 1359 | TGCCAATATCGGTGAGGAAGC | 0.17 |
| CIITA | gCIITA_41 | 1312 | TGCCCAACTTCTGCTGGCATC | 46.21 |
| CIITA | gCIITA_60 | 1330 | TGCCGGGCAGTGTGCCAGCTC | 11.98 |
| CIITA | gCIITA_18 | 1040 | TGCTGGCATCTCCATACTCTC | 4.8 |
| CIITA | gCIITA_64 | 1334 | TGGCTGGGCTGATCTTCCAGC | 0.5 |
| CIITA | gCIITA_67 | 1337 | TGGGCACCCGCCTCACGCCTC | 12.57 |
| CIITA | gCIITA_36 | 1307 | TGGGCTCAGGTGCTTCCTCAC | 85.46 |
| CIITA | gCIITA_5 | 1125 | TTAACAGCGATGCTGACCCCC | 0.1 |
| CIITA | gCIITA_3 | 1124 | TTACCTTGGGGCTCTGACAGG | 0 |
| CIITA | gCIITA_88 | 1356 | TTCTCCAGCCAGGTCCATCTG | 0.21 |
| CIITA | gCIITA_99 | 1367 | TTGGAGACCTCTCCAGCTGCC | 0.99 |
| CIITA | gCIITA_73 | 1343 | TTTAGGTCCCGAACAGCAGGG | 10.88 |
| CTLA4 | gCTLA4_36 | 143 | ACAGCTAAAGAAAAGAAGCCC | 3.9 |
| CTLA4 | gCTLA4_40 | 147 | AGCCTTATTTTATTCCCATCA | 0.3 |
| CTLA4 | gCTLA4_4 | 116 | AGCGGCACAAGGCTCAGCTGA | 58.4 |
| CTLA4 | gCTLA4_17 | 123 | AGTCACCTGGCTGTCAGCCTG | 0.4 |
| CTLA4 | gCTLA4_20 | 126 | ATTTCCACTGGAGGTGCCCGT | 0.1 |
| CTLA4 | gCTLA4_37 | 144 | CACATAGACCCCTGTTGTAAG | 2.9 |
| CTLA4 | gCTLA4_38 | 145 | CACATTCTGGCTCTGTTGGGG | 0.2 |
| CTLA4 | gCTLA4_19 | 114 | CACTGGAGGTGCCCGTGCAGA | 42.5 |
| CTLA4 | gCTLA4_6 | 113 | CAGAAGACAGGGATGAAGAGA | 44.6 |
| CTLA4 | gCTLA4_22 | 128 | CAGATGTAGAGTCCCGTGTCC | 0.6 |
| CTLA4 | gCTLA4_29 | 135 | CAGCAGTTAGTTCGGGGTTGT | 0.7 |
| CTLA4 | gCTLA4_11 | 119 | CCATGCTAGCAATGCACGTGG | 0.1 |
| CTLA4 | gCTLA4_14 | 112 | CCTGGAGATGCATACTCACAC | 47.4 |
| CTLA4 | gCTLA4_2 | 125 | CCTTGGATTTCAGCGGCACAA | 0.8 |
| CTLA4 | gCTLA4_18 | 124 | CTAGATGATTCCATCTGCACG | 2 |
| CTLA4 | gCTLA4_23 | 129 | CTCACCAATTACATAAATCTG | 0.8 |
| CTLA4 | gCTLA4_31 | 138 | CTCCTCACAGCTGTTTCTTTG | 1 |
| CTLA4 | gCTLA4_28 | 134 | CTCCTCTGGATCCTTGCAGCA | 3 |
| CTLA4 | gCTLA4_27 | 133 | CTGTTGCAGATCCAGAACCGT | 5 |
| CTLA4 | gCTLA4_21 | 127 | GATAGTGAGGTTCACTTGATT | 0.6 |
| CTLA4 | gCTLA4_3 | 136 | GATTTCAGCGGCACAAGGCTC | 0.6 |
| CTLA4 | gCTLA4_7 | 150 | GCAGAAGACAGGGATGAAGAG | 0.2 |
| CTLA4 | gCTLA4_15 | 121 | GCCTGGAGATGCATACTCACA | 0.2 |
| CTLA4 | gCTLA4_33 | 140 | GCTCAAAGAAACAGCTGTGAG | 0.8 |
| CTLA4 | gCTLA4_24 | 130 | GCTCACCAATTACATAAATCT | 1 |
| CTLA4 | gCTLA4_9 | 152 | GCTTTTCCATGCTAGCAATGC | 0.2 |
| CTLA4 | gCTLA4_16 | 122 | GGCAGGCTGACAGCCAGGTGA | 1.2 |
| CTLA4 | gCTLA4_8 | 151 | GGCTTTTCCATGCTAGCAATG | 0.1 |
| CTLA4 | gCTLA4_12 | 120 | GTGTGTGAGTATGCATCTCCA | 0.8 |
| CTLA4 | gCTLA4_25 | 131 | GTTTTCTGTTGCAGATCCAGA | 0.1 |
| CTLA4 | gCTLA4_41 | 148 | TCAATTGATGGGAATAAAATA | 3 |
| CTLA4 | gCTLA4_39 | 146 | TCACATTCTGGCTCTGTTGGG | 0.3 |
| CTLA4 | gCTLA4_10 | 118 | TCCATGCTAGCAATGCACGTG | 0.1 |
| CTLA4 | gCTLA4_32 | 139 | TCCTCACAGCTGTTTCTTTGA | 0.7 |
| CTLA4 | gCTLA4_1 | 117 | TGCCGCTGAAATCCAAGGCAA | 1.3 |
| CTLA4 | gCTLA4_13 | 115 | TGTGTGAGTATGCATCTCCAG | 12.6 |
| CTLA4 | gCTLA4_35 | 142 | TGTGTTTGACAGCTAAAGAAA | 0.1 |
| CTLA4 | gCTLA4_5 | 149 | TTCTTCTCTTCATCCCTGTCT | 1.7 |
| CTLA4 | gCTLA4_30 | 137 | TTTATAGCTTTCTCCTCACAG | 0.6 |
| CTLA4 | gCTLA4_26 | 132 | TTTTCTGTTGCAGATCCAGAA | 0.1 |
| CTLA4 | gCTLA4_34 | 141 | TTTTTGTGTTTGACAGCTAAA | 0.5 |
| DCK | gDCK_12 | 1156 | AACAATTGTGTGAAGATTGGG | 0.8 |
| DCK | gDCK_13 | 1157 | AACATTGCACCATCTGGCAAC | 1.2 |
| DCK | gDCK_17 | 1161 | AATTTTATTTTCATACCTCAA | 0 |
| DCK | gDCK_23 | 1165 | ACCTTCCAAACATATGCCTGT | 1.2 |
| DCK | gDCK_26 | 994 | AGCTTGCCATTCAGAGAGGCA | 13.3 |
| DCK | gDCK_9 | 1042 | AGGATATTCACAAATGTTGAC | 8.1 |
| DCK | gDCK_31 | 1171 | AGGTATATTTTTGCATCTAAT | 0.05 |
| DCK | gDCK_7 | 1045 | ATCTTTCCTCACAACAGCTGC | 1.5 |
| DCK | gDCK_16 | 1160 | ATTTTCATACCTCAAATTCAT | 0.1 |
| DCK | gDCK_24 | 1166 | CAAACATATGCCTGTCTCAGT | 1.1 |
| DCK | gDCK_20 | 1164 | CAATGTCTCAGAAAAATGGTG | 0.6 |
| DCK | gDCK_15 | 1159 | CATACCTCAAATTCATCTTGA | 0.3 |
| DCK | gDCK_11 | 1155 | CCAATCTTCACACAATTGTTT | 0.1 |
| DCK | gDCK_25 | 1167 | CCATTCAGAGAGGCAAGCTGA | 0.9 |
| DCK | gDCK_5 | 1153 | CCGATGTTCCCTTCGATGGAG | 0.5 |
| DCK | gDCK_27 | 1168 | CCTCTCTGAATGGCAAGCTCA | 1.1 |
| DCK | gDCK_6 | 1433 | CGGAGGCTCCTTACCGATGTT | 85.1 |
| DCK | gDCK_8 | 993 | CTCACAACAGCTGCAGGGAAG | 31.7 |
| DCK | gDCK_3 | 1151 | CTTGATGCGGGTCCCCTCAGA | 0.3 |
| DCK | gDCK_14 | 1158 | GAACATTGCACCATCTGGCAA | 0.6 |
| DCK | gDCK_22 | 1043 | GAAGGTAAAAGACCATCGTTC | 5.6 |
| DCK | gDCK_4 | 1152 | GATGGAGATTTTCTTGATGCG | 0.3 |
| DCK | gDCK_30 | 995 | TACATACCTGTCACTATACAC | 12.8 |
| DCK | gDCK_2 | 992 | TCAGCCAGCTCTGAGGGGACC | 50.4 |
| DCK | gDCK_21 | 1044 | TCATACATCATCTGAAGAACA | 3.6 |
| DCK | gDCK_19 | 1163 | TCTGAGACATTGTAAGTTCCT | 0.7 |
| DCK | gDCK_28 | 1169 | TCTGCATCTTTGAGCTTGCCA | 0.1 |
| DCK | gDCK_1 | 1150 | TCTTGGGCGGGGTGGCCATTC | 0.1 |
| DCK | gDCK_10 | 1154 | TGAATATCCTTAAACAATTGT | 1 |
| DCK | gDCK_18 | 1162 | TGCACATTCAAAATAGGAACT | 0.4 |
| DCK | gDCK_29 | 1170 | TTGAACGATCTGTGTATAGTG | 0.2 |
| FAS | gFAS_44 | 1200 | AACAAAGCAAGAACTTACCCC | 0.3 |
| FAS | gFAS_64 | 1217 | AACTTGACTTAGTGTCATGAC | 0.4 |
| FAS | gFAS_23 | 1187 | AAGACTCTTACCATGTCCTTC | 0.6 |
| FAS | gFAS_55 | 1209 | AAGTTGGAGATTCATGAGAAC | 0.4 |
| FAS | gFAS_56 | 1210 | AATACCTACAGGATTTAAAGT | 0.3 |
| FAS | gFAS_84 | 1235 | AATTTTCTGAGTCACTAGTAA | 0.6 |
| FAS | gFAS_4 | 1058 | ACAGGTTCTTACGTCTGTTGC | 1.5 |
| FAS | gFAS_89 | 1240 | AGAAATGAAATCCAAAGCTTG | 0.5 |
| FAS | gFAS_82 | 1233 | AGGATGATAGTCTGAATTTTC | 0.4 |
| FAS | gFAS_63 | 1216 | AGTAAATATATCACCACTATT | 0.8 |
| FAS | gFAS_47 | 1046 | AGTGAAGAGAAAGGAAGTACA | 9.8 |
| FAS | gFAS_77 | 1228 | ATCAATGTGTCATACGCTTCT | 0.8 |
| FAS | gFAS_22 | 1186 | ATCACACAATCTACATCTTCT | 0.5 |
| FAS | gFAS_35 | 997 | ATGATTCCATGTTCACATCTA | 58.5 |
| FAS | gFAS_76 | 1227 | ATGGAAAGAAAGAAGCGTATG | 1.3 |
| FAS | gFAS_67 | 1220 | ATTGACACCATTCTTTCGAAC | 0.5 |
| FAS | gFAS_86 | 1237 | ATTTCTGAAGTTTGAATTTTC | 0.3 |
| FAS | gFAS_3 | 1173 | ATTTTACAGGTTCTTACGTCT | 0.7 |
| FAS | gFAS_24 | 1188 | CAAACTGATTTTCTAGGCTTA | 0.1 |
| FAS | gFAS_9 | 1177 | CAAGTTCTGAGTCTCAACTGT | 0.1 |
| FAS | gFAS_37 | 1194 | CACTTGGTGTTGCTGGTGAGT | 1.3 |
| FAS | gFAS_28 | 1191 | CATCTGCACTTGGTATTCTGG | 1.2 |
| FAS | gFAS_73 | 1224 | CATGAAGTTGATGCCAATTAC | 0.8 |
| FAS | gFAS_60 | 1213 | CCAGATAAATTTATTGCCACT | 0.7 |
| FAS | gFAS_43 | 1199 | CCCCAAACAATTAGTGGAATT | 0.4 |
| FAS | gFAS_17 | 1181 | CCTTCTTGGCAGGGCACGCAG | 0.8 |
| FAS | gFAS_53 | 1207 | CCTTTCTGTGCTTTCTGCATG | 0.3 |
| FAS | gFAS_58 | 1212 | CTAGGAAACAGTGGCAATAAA | 1.3 |
| FAS | gFAS_25 | 1048 | CTAGGCTTAGAAGTGGAAATA | 3.5 |
| FAS | gFAS_61 | 1214 | CTATTTTTCAGATGTTGACTT | 0.1 |
| FAS | gFAS_80 | 1231 | CTCTGCAAGAGTACAAAGATT | 0.2 |
| FAS | gFAS_38 | 1056 | CTCTTTGCACTTGGTGTTGCT | 1.5 |
| FAS | gFAS_83 | 1234 | CTGAGTCACTAGTAATGTCCT | 0.7 |
| FAS | gFAS_50 | 1204 | CTGCATGTTTTCTGTACTTCC | 0.4 |
| FAS | gFAS_48 | 1202 | CTGTACTTCCTTTCTCTTCAC | 0.8 |
| FAS | gFAS_52 | 1206 | CTGTGCTTTCTGCATGTTTTC | 0.3 |
| FAS | gFAS_71 | 1055 | CTGTTCTGCTGTGTCTTGGAC | 1.5 |
| FAS | gFAS_33 | 1054 | CTTGGTGCAAGGGTCACAGTG | 1.6 |
| FAS | gFAS_65 | 1218 | GAACAAAGCCTTTAACTTGAC | 0.5 |
| FAS | gFAS_20 | 1184 | GAAGAAAAATGGGCTTTGTCT | 0.7 |
| FAS | gFAS_10 | 1049 | GAAGGCCTGCATCATGATGGC | 2.4 |
| FAS | gFAS_26 | 1189 | GAAGTGGAAATAAACTGCACC | 0.3 |
| FAS | gFAS_8 | 1176 | GAGTTGATGTCAGTCACTTGG | 0.1 |
| FAS | gFAS_87 | 1238 | GATTTCATTTCTGAAGTTTGA | 0.5 |
| FAS | gFAS_42 | 1198 | GCCAATTCCACTAATTGTTTG | 0.4 |
| FAS | gFAS_5 | 1051 | GGACGATAATCTAGCAACAGA | 1.9 |
| FAS | gFAS_1 | 999 | GGAGGATTGCTCAACAACCAT | 22.6 |
| FAS | gFAS_88 | 1239 | GGATTTCATTTCTGAAGTTTG | 0.5 |
| FAS | gFAS_15 | 1059 | GGCAGGTGAAAGGAAAGCTAG | 1.5 |
| FAS | gFAS_7 | 1175 | GGCATTAACACTTTTGGACGA | 0.1 |
| FAS | gFAS_69 | 1222 | GGCTTCATTGACACCATTCTT | 0.4 |
| FAS | gFAS_39 | 1195 | GGGTGGCTTTGTCTTCTTCTT | 0.1 |
| FAS | gFAS_72 | 1223 | GTAATTGGCATCAACTTCATG | 0.3 |
| FAS | gFAS_27 | 1190 | GTATTCTGGGTCCGGGTGCAG | 1.3 |
| FAS | gFAS_92 | 1243 | GTCTAGAGTGAAAAACAACAA | 0.5 |
| FAS | gFAS_19 | 1183 | GTCTGTGTACTCCTTCCCTTC | 0.6 |
| FAS | gFAS_40 | 1196 | GTCTTCTTCTTTTGCCAATTC | 0.6 |
| FAS | gFAS_32 | 1050 | GTGCAAGGGTCACAGTGTTCA | 2.4 |
| FAS | gFAS_12 | 998 | GTGTAACATACCTGGAGGACA | 29.9 |
| FAS | gFAS_36 | 987 | GTGTTGCTGGTGAGTGTGCAT | 61.9 |
| FAS | gFAS_66 | 1219 | GTTCGAAAGAATGGTGTCAAT | 0.9 |
| FAS | gFAS_29 | 1053 | GTTTACATCTGCACTTGGTAT | 1.6 |
| FAS | gFAS_54 | 1208 | GTTTTCCTTTCTGTGCTTTCT | 0.4 |
| FAS | gFAS_81 | 1232 | TACTCTTGCAGAGAAAATTCA | 0.2 |
| FAS | gFAS_59 | 1000 | TAGGAAACAGTGGCAATAAAT | 11 |
| FAS | gFAS_2 | 1172 | TATTTTACAGGTTCTTACGTC | 0.1 |
| FAS | gFAS_90 | 1241 | TCACTCTAGACCAAGCTTTGG | 0.5 |
| FAS | gFAS_62 | 1215 | TCAGATGTTGACTTGAGTAAA | 0.6 |
| FAS | gFAS_18 | 1182 | TCTGTGTACTCCTTCCCTTCT | 1 |
| FAS | gFAS_21 | 1185 | TCTTCCAAATGCAGAAGATGT | 0.7 |
| FAS | gFAS_41 | 1197 | TCTTCTTCTTTTGCCAATTCC | 0.1 |
| FAS | gFAS_85 | 1236 | TGAAGTTTGAATTTTCTGAGT | 0.4 |
| FAS | gFAS_49 | 1203 | TGCATGTTTTCTGTACTTCCT | 0.6 |
| FAS | gFAS_6 | 1174 | TGGACGATAATCTAGCAACAG | 0 |
| FAS | gFAS_11 | 1178 | TGGCAGAATTGGCCATCATGA | 0.8 |
| FAS | gFAS_51 | 1205 | TGTGCTTTCTGCATGTTTTCT | 0.3 |
| FAS | gFAS_70 | 1057 | TGTTCTGCTGTGTCTTGGACA | 1.5 |
| FAS | gFAS_14 | 1052 | TTCCTTGGGCAGGTGAAAGGA | 1.7 |
| FAS | gFAS_68 | 1221 | TTCGAAAGAATGGTGTCAATG | 0.7 |
| FAS | gFAS_46 | 1201 | TTCTTTCAGTGAAGAGAAAGG | 0.9 |
| FAS | gFAS_78 | 1229 | TTGAGATCTTTAATCAATGTG | 1 |
| FAS | gFAS_57 | 1211 | TTGCTTTCTAGGAAACAGTGG | 1.1 |
| FAS | gFAS_16 | 1180 | TTGGCAGGGCACGCAGTCTGG | 0.7 |
| FAS | gFAS_91 | 1242 | TTGTTTTTCACTCTAGACCAA | 0.7 |
| FAS | gFAS_74 | 1225 | TTTCCATGAAGTTGATGCCAA | 0.4 |
| FAS | gFAS_13 | 1179 | TTTCCTTGGGCAGGTGAAAGG | 1.1 |
| FAS | gFAS_75 | 1226 | TTTCTTTCCATGAAGTTGATG | 0.5 |
| FAS | gFAS_79 | 1230 | TTTGAGATCTTTAATCAATGT | 0.9 |
| FAS | gFAS_31 | 1193 | TTTGTAACTCTACTGTATGTG | 1.4 |
| FAS | gFAS_45 | 1047 | TTTGTTCTTTCAGTGAAGAGA | 6 |
| FAS | gFAS_30 | 1192 | TTTTGTAACTCTACTGTATGT | 0.8 |
| FAS | gFAS_34 | 996 | TTTTTCTAGATGTGAACATGG | 59.1 |
| TIM3 | gTIM3_37 | 364 | AAAATTAAAGCGCCGAAGATA | 0.2 |
| TIM3 | gTIM3_12 | 337 | AATGTGGCAACGTGGTGCTCA | 21.9 |
| TIM3 | gTIM3_43 | 371 | AATTCTGTATCTTCTCTTTGC | 0.7 |
| TIM3 | gTIM3_23 | 351 | ACCTGAAGTTGGTCATCAAAC | 2.2 |
| TIM3 | gTIM3_27 | 355 | ACTGCAGCCTTTCCAAGGATG | 2.6 |
| TIM3 | gTIM3_21 | 349 | AGGTTAAATTTTTCATCATTC | 0.1 |
| TIM3 | gTIM3_50 | 378 | ATATACGTTCTCTTCAATGGT | 0.5 |
| TIM3 | gTIM3_13 | 340 | ATCAGTCCTGAGCACCACGTT | 1.5 |
| TIM3 | gTIM3_22 | 350 | ATGACCAACTTCAGGTTAAAT | 0.1 |
| TIM3 | gTIM3_44 | 372 | ATTTCCACAGCCTCATCTCTT | 0.4 |
| TIM3 | gTIM3_29 | 334 | CAAGGATGCTTACCACCAGGG | 59.8 |
| TIM3 | gTIM3_46 | 374 | CACAGCCTCATCTCTTTGGCC | 0.5 |
| TIM3 | gTIM3_4 | 357 | CACATCTTCCCTTTGACTGTG | 0.8 |
| TIM3 | gTIM3_35 | 362 | CATAGCAAATATCCACATTGG | 1 |
| TIM3 | gTIM3_14 | 341 | CATCAGTCCTGAGCACCACGT | 0.1 |
| TIM3 | gTIM3_38 | 365 | CATTTGAAAATTAAAGCGCCG | 0.1 |
| TIM3 | gTIM3_28 | 356 | CCAAGGATGCTTACCACCAGG | 1.9 |
| TIM3 | gTIM3_48 | 376 | CCAATCCTGAGGGAGGGAGGT | 4.5 |
| TIM3 | gTIM3_30 | 336 | CCACCAGGGGACATGGCCCAG | 22.1 |
| TIM3 | gTIM3_10 | 383 | CCCCAGCAGACGGGCACGAGG | 7.3 |
| TIM3 | gTIM3_41 | 369 | CCCCTTACTAGGGTATTCTCA | 2.2 |
| TIM3 | gTIM3_18 | 345 | CGCAAAGGAGATGTGTCCCTG | 14.4 |
| TIM3 | gTIM3_16 | 343 | CGGAAATCCCCATTTAGCCAG | 0.4 |
| TIM3 | gTIM3_36 | 363 | CGGGACTCTGGAGCAACCATC | 3.3 |
| TIM3 | gTIM3_42 | 370 | CTAGGGTATTCTCATAGCAAA | 8.5 |
| TIM3 | gTIM3_33 | 360 | CTGTTAGATTTATATCAGGGA | 1.4 |
| TIM3 | gTIM3_49 | 377 | CTTCTGAGCGAATTCCCTCTG | 0.7 |
| TIM3 | gTIM3_3 | 348 | CTTCTGCAAGCTCCATGTTTT | 0.1 |
| TIM3 | gTIM3_7 | 333 | CTTGTAAGTAGTAGCAGCAGC | 64.4 |
| TIM3 | gTIM3_26 | 354 | GAAAGGCTGCAGTGAAGTCTC | 0.1 |
| TIM3 | gTIM3_5 | 368 | GACTGTGTCCTGCTGCTGCTG | 0.8 |
| TIM3 | gTIM3_19 | 346 | GATCCGGCAGCAGTAGATCCC | 5.1 |
| TIM3 | gTIM3_47 | 375 | GCCAACCTCCCTCCCTCAGGA | 6 |
| TIM3 | gTIM3_15 | 342 | GCCAGTATCTGGATGTCCAAT | 2.9 |
| TIM3 | gTIM3_11 | 339 | GCCCCAGCAGACGGGCACGAG | 0.6 |
| TIM3 | gTIM3_17 | 344 | GCGGAAATCCCCATTTAGCCA | 0.1 |
| TIM3 | gTIM3_51 | 379 | GGGTTGTCGCTTTGCAATGCC | 0.5 |
| TIM3 | gTIM3_40 | 367 | GTTTCCCCCTTACTAGGGTAT | 1.7 |
| TIM3 | gTIM3_6 | 335 | TAAGTAGTAGCAGCAGCAGCA | 53.7 |
| TIM3 | gTIM3_9 | 382 | TACACCCCAGCCGCCCCAGGG | 1 |
| TIM3 | gTIM3_31 | 358 | TATAGCAGAGACACAGACACT | 0.3 |
| TIM3 | gTIM3_32 | 359 | TATCAGGGAGGCTCCCCAGTG | 22.4 |
| TIM3 | gTIM3_20 | 347 | TCATCATTCATTATGCCTGGG | 0.1 |
| TIM3 | gTIM3_8 | 381 | TCTCTCTATGCAGGGTCCTCA | 0.1 |
| TIM3 | gTIM3_1 | 338 | TCTTCTGCAAGCTCCATGTTT | 0.1 |
| TIM3 | gTIM3_2 | 1244 | TCTTCTGCAAGCTCCATGTTT | 0.07 |
| TIM3 | gTIM3_25 | 353 | TGACATTAGCCAAGGTCACCC | 15.7 |
| TIM3 | gTIM3_24 | 352 | TGTTGTTTCTGACATTAGCCA | 0.7 |
| TIM3 | gTIM3_34 | 361 | TGTTTCCATAGCAAATATCCA | 5.6 |
| TIM3 | gTIM3_39 | 366 | TGTTTCCCCCTTACTAGGGTA | 0.7 |
| TIM3 | gTIM3_45 | 373 | TTTCCACAGCCTCATCTCTTT | 1 |
| LAG3 | gLAG3_18 | 167 | AACGTCTCCATCATGTATAAC | 1.1 |
| LAG3 | gLAG3_44 | 192 | ACAGAGCTGTCTAGCCCAGGT | 0.4 |
| LAG3 | gLAG3_21 | 171 | ACAGTGTACGCTGGAGCAGGT | 0.1 |
| LAG3 | gLAG3_24 | 174 | ACCCTTCGACTAGAGGATGTG | 0.8 |
| LAG3 | gLAG3_3 | 180 | ACCTGGAGCCACCCAAAGCGG | 3.1 |
| LAG3 | gLAG3_12 | 161 | AGCCGCCCTGACCGCCCAGCC | 0.1 |
| LAG3 | gLAG3_10 | 159 | CACAGTGACTGCCAGCCCCCC | N.D. |
| LAG3 | gLAG3_30 | 181 | CAGTGACTCCCAAATCCTTTG | 0.1 |
| LAG3 | gLAG3_27 | 177 | CCACCTGAGGCTGACCTGTGA | 3.4 |
| LAG3 | gLAG3_41 | 156 | CCAGCCTTGGCAATGCCAGCT | 8.3 |
| LAG3 | gLAG3_28 | 178 | CCCACCTGAGGCTGACCTGTG | 0.8 |
| LAG3 | gLAG3_40 | 189 | CCCAGCCTTGGCAATGCCAGC | 0.8 |
| LAG3 | gLAG3_31 | 182 | CCCAGGGATCCAGGTGACCCA | 3.1 |
| LAG3 | gLAG3_25 | 175 | CCCTTCGACTAGAGGATGTGA | 2.7 |
| LAG3 | gLAG3_7 | 206 | CCGCCCAGTGGCCCGCCCGCT | N.D. |
| LAG3 | gLAG3_14 | 163 | CCGCTAAGTGGTGATGGGGGG | 0.3 |
| LAG3 | gLAG3_13 | 162 | CGCTAAGTGGTGATGGGGGGA | 2.3 |
| LAG3 | gLAG3_23 | 173 | CTCACTGCCAAGTGGACTCCT | 0.4 |
| LAG3 | gLAG3_45 | 193 | CTCCATAGGTGCCCAACGCTC | 1.3 |
| LAG3 | gLAG3_55 | 203 | CTCTAAGGCAGAAAATCGTCT | 0.1 |
| LAG3 | gLAG3_49 | 197 | CTCTGCTCCTTTTGGTGACTG | 0.2 |
| LAG3 | gLAG3_20 | 170 | CTCTTCAGGTCTGGAGCCCCC | 0.2 |
| LAG3 | gLAG3_17 | 166 | CTCTTCCTGCCCCAAGTCAGC | 1.3 |
| LAG3 | gLAG3_56 | 204 | CTGCCTTAGAGCAAGGGATTC | 0.1 |
| LAG3 | gLAG3_1 | 158 | CTGTTTCTGCAGCCGCTTTGG | 0.2 |
| LAG3 | gLAG3_19 | 168 | CTTTTCTCTTCAGGTCTGGAG | 0.2 |
| LAG3 | gLAG3_11 | 160 | GAACTGCTCCTTCAGCCGCCC | 0.1 |
| LAG3 | gLAG3_26 | 176 | GACTAGAGGATGTGAGCCAGG | 1 |
| LAG3 | gLAG3_57 | 205 | GAGCAAGGGATTCACCCTCCG | 0.2 |
| LAG3 | gLAG3_42 | 190 | GCAATGCCAGCTGTACCAGGG | 0.6 |
| LAG3 | gLAG3_22 | 172 | GCAGTGAGGAAAGACCGGGTC | 2.1 |
| LAG3 | gLAG3_15 | 164 | GCGGAAAGCTTCCTCTTCCTG | 1 |
| LAG3 | gLAG3_4 | 188 | GCTCACCTAGTGAAGCCTCTC | 1.3 |
| LAG3 | gLAG3_39 | 187 | GCTGGAGGCACAGGAGGCCCA | 0.3 |
| LAG3 | gLAG3_54 | 202 | GCTTTCACCTTTGGAGAAGAC | 0.2 |
| LAG3 | gLAG3_53 | 201 | GGCTTTCACCTTTGGAGAAGA | 0.1 |
| LAG3 | gLAG3_16 | 165 | GGGCAGGAAGAGGAAGCTTTC | 6.4 |
| LAG3 | gLAG3_32 | 183 | GGGTCACCTGGATCCCTGGGG | 0.2 |
| LAG3 | gLAG3_6 | 153 | GGGTGCATACCTGTCTGGCTG | 52.4 |
| LAG3 | gLAG3_33 | 154 | GGTCACCTGGATCCCTGGGGA | 17.1 |
| LAG3 | gLAG3_52 | 200 | GGTGACTGGAGCCTTTGGCTT | 0.2 |
| LAG3 | gLAG3_34 | 184 | GTGAGGTGACTCCAGTATCTG | 0.7 |
| LAG3 | gLAG3_48 | 196 | GTGTCCTTTCTCTGCTCCTTT | 0.1 |
| LAG3 | gLAG3_36 | 185 | GTGTGGAGCTCTCTGGACACC | 0.9 |
| LAG3 | gLAG3_29 | 179 | TACTCTTTTCAGTGACTCCCA | 0.3 |
| LAG3 | gLAG3_38 | 155 | TCAGGACCTTGGCTGGAGGCA | 17.7 |
| LAG3 | gLAG3_47 | 195 | TCATCCTTGGTGTCCTTTCTC | 0.4 |
| LAG3 | gLAG3_46 | 194 | TCCATAGGTGCCCAACGCTCT | 4 |
| LAG3 | gLAG3_9 | 208 | TCCTTGCACAGTGACTGCCAG | N.D. |
| LAG3 | gLAG3_8 | 207 | TCGCTATGGCTGCGCCCAGCC | 0.1 |
| LAG3 | gLAG3_50 | 1245 | TCTGCTCCTTTTGGTGACTGG | 0.1 |
| LAG3 | gLAG3_35 | 157 | TGAGGTGACTCCAGTATCTGG | 9.3 |
| LAG3 | gLAG3_2 | 169 | TGCAGCCGCTTTGGGTGGCTC | 0.2 |
| LAG3 | gLAG3_5 | 198 | TGCGAAGAGCAGGGGTCACTT | 0.8 |
| LAG3 | gLAG3_51 | 199 | TGGTGACTGGAGCCTTTGGCT | 0.6 |
| LAG3 | gLAG3_37 | 186 | TGTGGAGCTCTCTGGACACCC | 6.9 |
| LAG3 | gLAG3_43 | 191 | TTGGAGCAGCAGTGTACTTCA | 0.8 |
| PD | gPD_1 | 214 | AACCTGACCTGGGACAGTTTC | 0.2 |
| PD | gPD_7 | 237 | ACCTGCAGCTTCTCCAACACA | 0.2 |
| PD | gPD_16 | 220 | ATCTGCGCCTTGGGGGCCAGG | 1.2 |
| PD | gPD_14 | 218 | CACATGAGCGTGGTCAGGGCC | 0.1 |
| PD | gPD_20 | 225 | CAGAGAGAAGGGCAGAAGTGC | 2.5 |
| PD | gPD_27 | 211 | CAGTGGCGAGAGAAGACCCCG | 23.7 |
| PD | gPD_12 | 216 | CCCGAGGACCGCAGCCAGCCC | 0.4 |
| PD | gPD_28 | 231 | CCTAGCGGAATGGGCACCTCA | 0.1 |
| PD | gPD_2 | 224 | CCTTCCGCTCACCTCCGCCTG | 46.9 |
| PD | gPD_3 | 232 | CGCTCACCTCCGCCTGAGCAG | 1 |
| PD | gPD_13 | 217 | CGTGTCACACAACTGCCCAAC | 0.5 |
| PD | gPD_29 | 212 | CTAGCGGAATGGGCACCTCAT | 30.3 |
| PD | gPD_24 | 228 | CTCCTCAAAGAAGGAGGACCC | 0.1 |
| PD | gPD_22 | 227 | GAACTGGCCGGCTGGCCTGGG | 1.7 |
| PD | gPD_15 | 219 | GATCTGCGCCTTGGGGGCCAG | 0.1 |
| PD | gPD_8 | 209 | GCACGAAGCTCTCCGATGTGT | 41.7 |
| PD | gPD_30 | 233 | GCCCCTCTGACCGGCTTCCTT | 0.3 |
| PD | gPD_17 | 221 | GGGGCCAGGGAGATGGCCCCA | 0.6 |
| PD | gPD_6 | 236 | GGTCACCACGAGCAGGGCTGG | 0.7 |
| PD | gPD_18 | 222 | GTGCCCTTCCAGAGAGAAGGG | 1.7 |
| PD | gPD_10 | 213 | GTGCTAAACTGGTACCGCATG | 0.2 |
| PD | gPD_9 | 238 | TCCAACACATCGGAGAGCTTC | 0.2 |
| PD | gPD_4 | 234 | TCCACTGCTCAGGCGGAGGTG | 0.6 |
| PD | gPD_5 | 235 | TCCCCAGCCCTGCTCGTGGTG | 1.2 |
| PD | gPD_11 | 215 | TCCGTCTGGTTGCTGGGGCTC | 0.1 |
| PD | gPD_25 | 229 | TCCTCAAAGAAGGAGGACCCC | 0.5 |
| PD | gPD_26 | 230 | TCTCGCCACTGGAAATCCAGC | 0.2 |
| PD | gPD_23 | 210 | TCTGCAGGGACAATAGGAGCC | 57.6 |
| PD | gPD_19 | 223 | TGCCCTTCCAGAGAGAAGGGC | 0.9 |
| PD | gPD_21 | 226 | TGCCCTTCTCTCTGGAAGGGC | 1.4 |
| PTPN6 | gPTPN6_22 | 268 | AAGAAGACGGGGATTGAGGAG | 22.3 |
| PTPN6 | gPTPN6_48 | 291 | AATGAACTGGGCGATGGCCAC | 3.3 |
| PTPN6 | gPTPN6_1 | 254 | ACCGAGACCTCAGTGGGCTGG | 58.2 |
| PTPN6 | gPTPN6_46 | 252 | ACTGCCCCCCACCCAGGCCTG | 80.3 |
| PTPN6 | gPTPN6_2 | 265 | AGCAGGGTCTCTGCATCCAGC | 0.3 |
| PTPN6 | gPTPN6_8 | 300 | AGGTGGATGATGGTGCCGTCG | 3.5 |
| PTPN6 | gPTPN6_30 | 275 | ATGTAGTTGGCATTGATGTAG | 0.2 |
| PTPN6 | gPTPN6_17 | 262 | ATGTGGGTGACCCTGAGCGGG | 0.9 |
| PTPN6 | gPTPN6_28 | 273 | CACCAGCGTCTGGAAGGGCAG | 5.4 |
| PTPN6 | gPTPN6_36 | 281 | CAGAACAAATGCGTCCCATAC | 0.5 |
| PTPN6 | gPTPN6_26 | 251 | CAGAAGCAGGAGGTGAAGAAC | 77.5 |
| PTPN6 | gPTPN6_27 | 272 | CAGACGCTGGTGCAAGTTCTT | 0.3 |
| PTPN6 | gPTPN6_39 | 283 | CAGGTCTCCCCGCTGGACAAT | 1.6 |
| PTPN6 | gPTPN6_35 | 280 | CCAGAACAAATGCGTCCCATA | 0.2 |
| PTPN6 | gPTPN6_25 | 271 | CCCACCCACATCTCAGAGTTT | 34.8 |
| PTPN6 | gPTPN6_44 | 1246 | CCCAGCGCCGGCATCGGCCGC | N.D. |
| PTPN6 | gPTPN6_53 | 295 | CCCCCCTGCACCCGGCTGCAG | 7 |
| PTPN6 | gPTPN6_18 | 263 | CCTCGCACATGACCTTGATGT | 1.4 |
| PTPN6 | gPTPN6_9 | 301 | CCTGACGCTGCCTTCTCTAGG | 0.8 |
| PTPN6 | gPTPN6_43 | 288 | CCTGCCGCTGGTTGATCTGGT | 0.3 |
| PTPN6 | gPTPN6_7 | 250 | CGACTCTGACAGAGCTGGTGG | 78.1 |
| PTPN6 | gPTPN6_31 | 276 | CGTCCAGAACCAGCTGCTAGG | 0.3 |
| PTPN6 | gPTPN6_34 | 279 | CTCCACCTCTCGGGTGGTCAT | 1.2 |
| PTPN6 | gPTPN6_56 | 298 | CTCCTCCCTCTTGTTCTTAGT | 0.1 |
| PTPN6 | gPTPN6_42 | 287 | CTGCCGCTGGTTGATCTGGTC | 5.3 |
| PTPN6 | gPTPN6_41 | 286 | CTGGACCAGATCAACCAGCGG | 8.4 |
| PTPN6 | gPTPN6_4 | 284 | CTGGCTCGGCCCAGTCGCAAG | 4.3 |
| PTPN6 | gPTPN6_15 | 260 | CTGTGCTCAGTGACCAGCCCA | 0.5 |
| PTPN6 | gPTPN6_21 | 267 | GACAGCCTCACGGACCTGGTG | 0.5 |
| PTPN6 | gPTPN6_51 | 1248 | GACGAGGTGCGGGAGGCCTTG | N.D. |
| PTPN6 | gPTPN6_20 | 266 | GAGACCTTCGACAGCCTCACG | 9.7 |
| PTPN6 | gPTPN6_52 | 294 | GAGTCTAGTGCAGGGACCGTG | 0.1 |
| PTPN6 | gPTPN6_50 | 1247 | GCATGGGCATTCTTCATGGCT | N.D. |
| PTPN6 | gPTPN6_11 | 256 | GCCTGCAGCAGCGTCTCTGCC | 0.2 |
| PTPN6 | gPTPN6_19 | 264 | GCTCCCCCCAGGGTGGACGCT | 13.5 |
| PTPN6 | gPTPN6_24 | 270 | GCTGTATCCTCGGACTCCTGC | 0.4 |
| PTPN6 | gPTPN6_14 | 259 | GGCTGGTCACTGAGCACAGAA | 10.4 |
| PTPN6 | gPTPN6_40 | 285 | GGGAGACCTGATTCGGGAGAT | 3.4 |
| PTPN6 | gPTPN6_13 | 258 | GTGCTTTCTGTGCTCAGTGAC | 0.8 |
| PTPN6 | gPTPN6_45 | 289 | GTGGAGATGTTCTCCATGAGC | N.D. |
| PTPN6 | gPTPN6_47 | 290 | TACTGCGCCTCCGTCTGCACC | 0.1 |
| PTPN6 | gPTPN6_6 | 249 | TATGACCTGTATGGAGGGGAG | 83.4 |
| PTPN6 | gPTPN6_38 | 282 | TATTCGGTTGTGTCATGCTCC | 0.1 |
| PTPN6 | gPTPN6_33 | 278 | TCCACCTCTCGGGTGGTCATG | 0.7 |
| PTPN6 | gPTPN6_5 | 293 | TCCCCTCCATACAGGTCATAG | 14.8 |
| PTPN6 | gPTPN6_55 | 297 | TCCTCCCTCTTGTTCTTAGTG | 0 |
| PTPN6 | gPTPN6_10 | 255 | TCTAGGTGGTACCATGGCCAC | 2.4 |
| PTPN6 | gPTPN6_32 | 277 | TGGCAGATGGCGTGGCAGGAG | 4.4 |
| PTPN6 | gPTPN6_37 | 253 | TGGGCCCTACTCTGTGACCAA | 51.3 |
| PTPN6 | gPTPN6_54 | 296 | TGTCTGCAGCCGGGTGCAGGG | 0.9 |
| PTPN6 | gPTPN6_16 | 261 | TGTGCTCAGTGACCAGCCCAA | 37.5 |
| PTPN6 | gPTPN6_57 | 299 | TTCACTTTCTCCTCCCTCTTG | 0.2 |
| PTPN6 | gPTPN6_29 | 274 | TTCTCTGGCCGCTGCCCTTCC | 0.1 |
| PTPN6 | gPTPN6_49 | 292 | TTCTTAGTGGTTTCAATGAAC | 0.1 |
| PTPN6 | gPTPN6_12 | 257 | TTGTGCGTGAGAGCCTCAGCC | 29.4 |
| PTPN6 | gPTPN6_23 | 269 | TTGTTCAGTTCCAACACTCGG | 0.1 |
| TIGIT | gTIGIT_13 | 309 | AAGGATCGAGTGGCCCCAGGT | 0.2 |
| TIGIT | gTIGIT_12 | 308 | AAGGATGGGGAGATGTGCCAC | 0.4 |
| TIGIT | gTIGIT_31 | 327 | AATGTCCTGAGTTACAGAAGC | 0.5 |
| TIGIT | gTIGIT_2 | 302 | AGGCCTTACCTGAGGCGAGGG | 81.7 |
| TIGIT | gTIGIT_26 | 321 | CACAGAATGGATTCTGAGGGC | 0.3 |
| TIGIT | gTIGIT_1 | 307 | CCTGAGGCGAGGGGAGCCTGC | 0.2 |
| TIGIT | gTIGIT_16 | 312 | CTAGGACCTCCAGGAAGATTC | 0.5 |
| TIGIT | gTIGIT_21 | 316 | CTAGTCAACGCGACCACCACG | 0.1 |
| TIGIT | gTIGIT_17 | 313 | CTCCAGCAGGAATACCTGAGC | 0.8 |
| TIGIT | gTIGIT_27 | 322 | CTCCTGAGGTCACCTTCCACA | 1.6 |
| TIGIT | gTIGIT_6 | 330 | CTCTGCAGAAATGTTCCCCGT | 0.1 |
| TIGIT | gTIGIT_28 | 323 | CTGGGGGTGAGGGAGCACTGG | 0.5 |
| TIGIT | gTIGIT_19 | 314 | GAGCCATGGCCGCGACGCTGG | 0.9 |
| TIGIT | gTIGIT_11 | 304 | GGGTGGCACATCTCCCCATCC | 9.7 |
| TIGIT | gTIGIT_18 | 303 | GTCCTCCCTCTAGTGGCTGAG | 72.4 |
| TIGIT | gTIGIT_3 | 325 | GTCCTCTTCCCTAGGAATGAT | 1.3 |
| TIGIT | gTIGIT_10 | 306 | TAATGCTGACTTGGGGTGGCA | 1.6 |
| TIGIT | gTIGIT_25 | 320 | TAGAAGAAAGCCCTCAGAATC | 1.2 |
| TIGIT | gTIGIT_15 | 311 | TAGGACCTCCAGGAAGATTCT | 0.4 |
| TIGIT | gTIGIT_20 | 315 | TAGTCAACGCGACCACCACGA | 0.1 |
| TIGIT | gTIGIT_22 | 317 | TAGTTTGTTTGTTTTTAGAAG | 0.6 |
| TIGIT | gTIGIT_4 | 328 | TATTGTGCCTGTCATCATTCC | 1 |
| TIGIT | gTIGIT_5 | 329 | TCTGCAGAAATGTTCCCCGTT | 1.1 |
| TIGIT | gTIGIT_7 | 305 | TGCAGAGAAAGGTGGCTCTAT | 6 |
| TIGIT | gTIGIT_14 | 310 | TGCATCTATCACACCTACCCT | 1.4 |
| TIGIT | gTIGIT_8 | 331 | TGCCGTGGTGGAGGAGAGGTG | 0.3 |
| TIGIT | gTIGIT_29 | 324 | TGCCTGGACACAGCTTCCTGG | 0.3 |
| TIGIT | gTIGIT_9 | 332 | TGGCCATTTGTAATGCTGACT | 0.8 |
| TIGIT | gTIGIT_30 | 326 | TGTAACTCAGGACATTGAAGT | 0.5 |
| TIGIT | gTIGIT_23 | 318 | TTTGTTTTTAGAAGAAAGCCC | 1 |
| TIGIT | gTIGIT_24 | 319 | TTTTTAGAAGAAAGCCCTCAG | 0.4 |
| TRAC | gTRAC019 | 1070 | AACTATAAATCAGAACACCTG | 4.5 |
| TRAC | gTRAC089 | 1283 | AACTCAGGGTTGAGAAAACAG | 0.7 |
| TRAC | gTRAC034 | 1265 | AAGAAGATCCTATTAAATAAA | 0.1 |
| TRAC | gTRAC080 | 1278 | AATTCCTCCACTTCAACACCT | 0.5 |
| TRAC | gTRAC015 | 1256 | ACCTGCAAAATGAATATGGTG | 0 |
| TRAC | gTRAC065 | 1274 | ACTAAGAAACAGTGAGCCTTG | 0.2 |
| TRAC | gTRAC090 | 1284 | ACTCAGGGTTGAGAAAACAGC | 0.1 |
| TRAC | gTRAC044 | 1063 | AGAATCAAAATCGGTGAATAG | 7.4 |
| TRAC | gTRAC060 | 1272 | AGACATCATTGACCAGAGCTC | 1.3 |
| TRAC | gTRAC035 | 1062 | AGGTTTCCTTGAGTGGCAGGC | 7.5 |
| TRAC | gTRAC037 | 1266 | AGTGAACGTTCACGGCCAGGC | 0.7 |
| TRAC | gTRAC007 | 1081 | ATAAACTGTAAAGTACCAAAC | 1.7 |
| TRAC | gTRAC030 | 1077 | ATAGGATCTTCTTCAAAACCC | 2.2 |
| TRAC | gTRAC079 | 1006 | ATTCCTCCACTTCAACACCTG | 45.4 |
| TRAC | gTRAC048 | 1071 | ATTCTCAAACAAATGTGTCAC | 4.5 |
| TRAC | gTRAC032 | 1264 | ATTTAATAGGATCTTCTTCAA | 0.1 |
| TRAC | gTRAC055 | 1270 | CACATGCAAAGTCAGATTTGT | 1 |
| TRAC | gTRAC017 | 1434 | CAGGTGAAATTCCTGAGATGT | 63.6 |
| TRAC | gTRAC010 | 1254 | CAGTTTATTAAATAGATGTTT | 0.5 |
| TRAC | gTRAC056 | 1073 | CATGTGCAAACGCCTTCAACA | 3.9 |
| TRAC | gTRAC023 | 1259 | CCAACTTAATGCCAACATACC | 1.4 |
| TRAC | gTRAC078 | 1002 | CCAGCTCACTAAGTCAGTCTC | 47.4 |
| TRAC | gTRAC082 | 1016 | CCAGCTGACAGATGGGCTCCC | 21.5 |
| TRAC | gTRAC028 | 1022 | CCATGCCTGCCTTTACTCTGC | 15.3 |
| TRAC | gTRAC083 | 1083 | CCCAGCTGACAGATGGGCTCC | 1.6 |
| TRAC | gTRAC027 | 1262 | CCCATGCCTGCCTTTACTCTG | 0.7 |
| TRAC | gTRAC041 | 1018 | CCCCAACCCAGGCTGGAGTCC | 18.7 |
| TRAC | gTRAC072 | 1064 | CCCCTTACTGCTCTTCTAGGC | 6.9 |
| TRAC | gTRAC068 | 1068 | CCCGTGTCATTCTCTGGACTG | 5.3 |
| TRAC | gTRAC040 | 1017 | CCGTATAAAGCATGAGACCGT | 21.5 |
| TRAC | gTRAC067 | 1005 | CCGTGTCATTCTCTGGACTGC | 45.4 |
| TRAC | gTRAC042 | 1061 | CCTCTTTGCCCCAACCCAGGC | 7.6 |
| TRAC | gTRAC005 | 1252 | CCTTAGTGCTGAGACTCATTC | 0.6 |
| TRAC | gTRAC003 | 1250 | CGTAGGATTTTGTGTTTTTAA | 0.1 |
| TRAC | gTRAC066 | 1060 | CTAAGAAACAGTGAGCCTTGT | 9.5 |
| TRAC | gTRAC086 | 1280 | CTCAACCCTGAGTTAAAACAC | 0.2 |
| TRAC | gTRAC071 | 1075 | CTCAGACTGTTTGCCCCTTAC | 3.4 |
| TRAC | gTRAC018 | 1013 | CTCGATATAAGGCCTTGAGCA | 26 |
| TRAC | gTRAC029 | 1021 | CTCTGCCAGAGTTATATTGCT | 15.8 |
| TRAC | gTRAC025 | 1069 | CTGGGCCTTTTTCCCATGCCT | 4.6 |
| TRAC | gTRAC004 | 1251 | CTTAGTGCTGAGACTCATTCT | 0.7 |
| TRAC | gTRAC036 | 1072 | CTTGAGTGGCAGGCCAGGCCT | 4.4 |
| TRAC | gTRAC058 | 1009 | CTTGCTTCAGGAATGGCCAGG | 27.8 |
| TRAC | gTRAC024 | 1260 | CTTTGCTGGGCCTTTTTCCCA | 1 |
| TRAC | gTRAC020 | 1066 | GAACTATAAATCAGAACACCT | 6.4 |
| TRAC | gTRAC033 | 1078 | GAAGAAGATCCTATTAAATAA | 2 |
| TRAC | gTRAC059 | 1435 | GACATCATTGACCAGAGCTCT | 50.1 |
| TRAC | gTRAC084 | 1082 | GACTTTTCCCAGCTGACAGAT | 1.6 |
| TRAC | gTRAC043 | 1014 | GAGTCTCTCAGCTGGTACACG | 25.9 |
| TRAC | gTRAC047 | 1269 | GATTCTCAAACAAATGTGTCA | 0.1 |
| TRAC | gTRAC073 | 1001 | GCAGACAGGGAGAAATAAGGA | 66.9 |
| TRAC | gTRAC016 | 1257 | GCAGGTGAAATTCCTGAGATG | 0.2 |
| TRAC | gTRAC074 | 1012 | GGCAGACAGGGAGAAATAAGG | 27.1 |
| TRAC | gTRAC062 | 1065 | GGTGGCAATGGATAAGGCCGA | 6.5 |
| TRAC | gTRAC009 | 1080 | GTACTTTACAGTTTATTAAAT | 1.7 |
| TRAC | gTRAC088 | 1282 | GTCCTGAAGGTAGCTGTTTTC | 0.1 |
| TRAC | gTRAC050 | 1023 | GTCTGTGATATACACATCAGA | 11.4 |
| TRAC | gTRAC057 | 1271 | GTGCCTTCGCAGGCTGTTTCC | 0.9 |
| TRAC | gTRAC061 | 1008 | GTGGCAATGGATAAGGCCGAG | 38.8 |
| TRAC | gTRAC002 | 1249 | GTGTTTTTAATGTGACTCTCA | 0.4 |
| TRAC | gTRAC039 | 1004 | TAAGATGCTATTTCCCGTATA | 45.8 |
| TRAC | gTRAC081 | 1076 | TAATTCCTCCACTTCAACACC | 2.3 |
| TRAC | gTRAC038 | 1007 | TACGGGAAATAGCATCTTAGA | 40.7 |
| TRAC | gTRAC064 | 1074 | TACTAAGAAACAGTGAGCCTT | 3.5 |
| TRAC | gTRAC021 | 1010 | TAGTTCAAAACCTCTATCAAT | 27.7 |
| TRAC | gTRAC012 | 1003 | TATGGAGAAGCTCTCATTTCT | 46.7 |
| TRAC | gTRAC085 | 1279 | TCAACCCTGAGTTAAAACACA | 0.5 |
| TRAC | gTRAC014 | 1020 | TCAGAAGAGCCTGGCTAGGAA | 16.6 |
| TRAC | gTRAC026 | 1261 | TCCCATGCCTGCCTTTACTCT | 0.6 |
| TRAC | gTRAC069 | 1275 | TCCCGTGTCATTCTCTGGACT | 1 |
| TRAC | gTRAC077 | 1277 | TCCCTGTCTGCCAAAAAATCT | 1.1 |
| TRAC | gTRAC087 | 1281 | TCCTGAAGGTAGCTGTTTTCT | 0.2 |
| TRAC | gTRAC049 | 1011 | TCTGTGATATACACATCAGAA | 27.6 |
| TRAC | gTRAC046 | 1268 | TGACACATTTGTTTGAGAATC | 0.2 |
| TRAC | gTRAC006 | 988 | TGAGGGTGAAGGATAGACGCT | 81.8 |
| TRAC | gTRAC075 | 1015 | TGGCAGACAGGGAGAAATAAG | 25.2 |
| TRAC | gTRAC022 | 1258 | TGGTATGTTGGCATTAAGTTG | 1 |
| TRAC | gTRAC001 | 1079 | TGTTTTTAATGTGACTCTCAT | 1.8 |
| TRAC | gTRAC011 | 1255 | TTAAATAGATGTTTATATGGA | 0 |
| TRAC | gTRAC063 | 1273 | TTAGTAAAAAGAGGGTTTTGG | 1.4 |
| TRAC | gTRAC070 | 1276 | TTCCCGTGTCATTCTCTGGAC | 0.3 |
| TRAC | gTRAC076 | 1019 | TTGGCAGACAGGGAGAAATAA | 16.7 |
| TRAC | gTRAC031 | 1263 | TTTAATAGGATCTTCTTCAAA | 0.3 |
| TRAC | gTRAC013 | 1067 | TTTCTCAGAAGAGCCTGGCTA | 5.8 |
| TRAC | gTRAC045 | 1267 | TTTGAGAATCAAAATCGGTGA | 1.3 |
| TRAC | gTRAC008 | 1253 | TTTGGTACTTTACAGTTTATT | 0.2 |
| TRBC1 + 2 | gTRBC1 + 2_1 | 1372 | AGCCATCAGAAGCAGAGATCT | 66.40 |
| | | | | (TRBC1); |
| | | | | 74.7 |
| | | | | (TRBC2) |
| TRBC1 + 2 | gTRBC1 + 2_3 | 1373 | CGCTGTCAAGTCCAGTTCTAC | 71.28 |
| | | | | (TRBC1) |
| TRBC2 | gTRBC2_11 | 1378 | AGACTGTGGCTTCACCTCCGG | 19.97 |
| TRBC2 | gTRBC2_19 | 1386 | CACAGGTCAAGAGAAAGGATT | 1.58 |
| TRBC2 | gTRBC2_10 | 1377 | CAGACTGTGGCTTCACCTCCG | 0.16 |
| TRBC2 | gTRBC2_14 | 1381 | CCAGCAAGGGGTCCTGTCTGC | 6.69 |
| TRBC2 | gTRBC2_17 | 1384 | CCATGGCCATCAGCACGAGGG | 1.75 |
| TRBC2 | gTRBC2_7 | 1374 | CCCTGTTTTCTTTCAGACTGT | 0.09 |
| TRBC2 | gTRBC2_12 | 1379 | CCGGAGGTGAAGCCACAGTCT | 33.14 |
| TRBC2 | gTRBC2_18 | 1385 | CCTAGCAAGATCTCATAGAGG | 0.37 |
| TRBC2 | gTRBC2_15 | 1382 | CTAGGGAAGGCCACCTTGTAT | 21.74 |
| TRBC2 | gTRBC2_8 | 1375 | CTTTCAGACTGTGGCTTCACC | 0.24 |
| TRBC2 | gTRBC2_21 | 1387 | GAGCTAGCCTCTGGAATCCTT | 11.89 |
| TRBC2 | gTRBC2_16 | 1383 | TATGCCGTGCTGGTCAGTGCC | 0.2 |
| TRBC2 | gTRBC2_13 | 1380 | TCAACAGAGTCTTACCAGCAA | 1.2 |
| TRBC2 | gTRBC2_9 | 1376 | TTTCAGACTGTGGCTTCACCT | 0.24 |
| CARD11 | gCARD11_2 | 1389 | ATCTTGTAGTACCGCTCCTGG | 0.07 |
| CARD11 | gCARD11_3 | 1390 | CTTCATCTTGTAGTACCGCTC | 0.08 |
| CARD11 | gCARD11_1 | 1388 | TAGTACCGCTCCTGGAAGGTT | 1.37 |
| CD247 | gCD247_23 | 104 | ACGCCAGGGTCTCAGTACAGC | 0.3 |
| CD247 | gCD247_19 | 99 | ACTCCCAAACAACCAGCGCCG | 43.17 |
| CD247 | gCD247_15 | 95 | ATCCCAATCTCACTGTAGGCC | 31.12 |
| CD247 | gCD247_16 | 96 | CATCCCAATCTCACTGTAGGC | 0.1 |
| CD247 | gCD247_7 | 109 | CCCCCATCTCAGGGTCCCGGC | 6.43 |
| CD247 | gCD247_11 | 92 | CCGTTGTCTTTCCTAGCAGAG | 1.18 |
| CD247 | gCD247_3 | 105 | CGGAGGGTCTACGGCGAGGCT | 20.79 |
| CD247 | gCD247_2 | 100 | CGTTATAGAGCTGGTTCTGGC | 0.2 |
| CD247 | gCD247_12 | 89 | CTAGCAGAGAAGGAAGAACCC | 70.64 |
| CD247 | gCD247_17 | 97 | CTCATTTCACTCCCAAACAAC | 0.3 |
| CD247 | gCD247_10 | 91 | CTGAGGGTTCTTCCTTCTCTG | 0.05 |
| CD247 | gCD247_22 | 103 | CTTTCACGCCAGGGTCTCAGT | 8.24 |
| CD247 | gCD247_8 | 110 | GACAAGAGACGTGGCCGGGAC | 40.95 |
| CD247 | gCD247_18 | 98 | TCATTTCACTCCCAAACAACC | 44.34 |
| CD247 | gCD247_6 | 108 | TCCAAAACATCGTACTCCTCT | 0.34 |
| CD247 | gCD247_9 | 111 | TCTCCCTCTAACGTCTTCCCG | 4.13 |
| CD247 | gCD247_5 | 107 | TCTGTTATAGGAGCTCAATCT | 0.24 |
| CD247 | gCD247_21 | 102 | TGATTTGCTTTCACGCCAGGG | 5.23 |
| CD247 | gCD247_14 | 94 | TGCAGGAACTGCAGAAAGATA | 2.91 |
| CD247 | gCD247_13 | 93 | TGCAGTTCCTGCAGAAGAGGG | 4.93 |
| CD247 | gCD247_1 | 90 | TGTGTTGCAGTTCAGCAGGAG | 55.77 |
| CD247 | gCD247_4 | 106 | TTATCTGTTATAGGAGCTCAA | 12.31 |
| CD247 | gCD247_20 | 101 | TTTTCTGATTTGCTTTCACGC | 0.1 |
| IL7R | gIL7R_6 | 1396 | AGTTTTTTCTCTGTCGCTCTG | 0.06 |
| IL7R | gIL7R_3 | 1393 | CAGGGGAGATGGATCCTATCT | 87.87 |
| IL7R | gIL7R_8 | 1398 | CATAACACACAGGCCAAGATG | 25.83 |
| IL7R | gIL7R_2 | 1392 | CCAGGGGAGATGGATCCTATC | 8.35 |
| IL7R | gIL7R_4 | 1394 | CTAACCATCAGCATTTTGAGT | 0.11 |
| IL7R | gIL7R_1 | 1391 | CTTTCCAGGGGAGATGGATCC | 0.25 |
| IL7R | gIL7R_5 | 1395 | GAGTTTTTTCTCTGTCGCTCT | 0.07 |
| IL7R | gIL7R_7 | 1397 | TCTGTCGCTCTGTTGGTCATC | 2.61 |
| LCK1 | gLCK1_3 | 1401 | ACCCATCAACCCGTAGGGATG | 16.21 |
| LCK1 | gLCK1_1 | 1399 | ATGTCCTTTCACCCATCAACC | 0.06 |
| LCK1 | gLCK1_2 | 1400 | CACCCATCAACCCGTAGGGAT | 0.17 |
| PLCG1 | gPLCG1_2 | 1403 | CCTTTCTGCGCTTCGTGGTGT | 5.14 |
| PLCG1 | gPLCG1_1 | 1402 | CTCATACACCACGAAGCGCAG | 0.09 |
| PLCG1 | gPLCG1_3 | 1404 | CTGCGCTTCGTGGTGTATGAG | 0.05 |
| PLCG1 | gPLCG1_5 | 1406 | GTGGTGTATGAGGAAGACATG | 3.53 |
| PLCG1 | gPLCG1_4 | 1405 | TGCGCTTCGTGGTGTATGAGG | 1.91 |
| DHODH | gDHODH_3 | 1416 | TATGCTGAACACCTGATGCCG | 74.94 |
| DHODH | gDHODH_1 | 1414 | TTGCAGAAGCGGGCCCAGGAT | 0.6 |
| DHODH | gDHODH_2 | 1415 | TTGCAGAAGCGGGCCCAGGAT | 0.59 |
| MVD | gMVD_1 | 1427 | CAGTTAAAAACCACCACAACA | 1.42 |
| MVD | gMVD_2 | 1428 | GCTGAATGGCCGGGAGGAGGA | 14.06 |
| MVD | gMVD_3 | 1429 | TGGAGTGGCAGATGGGAGAGC | 63.22 |
| PLK1 | gPLK1_7 | 1423 | CATGGACATCTTCTCCCTCTG | 90.07 |
| PLK1 | gPLK1_6 | 1422 | CCAAGTGCTTCGAGATCTCGG | 2.07 |
| PLK1 | gPLK1_1 | 1417 | CCAGGGTCGGCCGGTGCCCGT | 29.06 |
| PLK1 | gPLK1_9 | 1425 | CGAGGACAACGACTTCGTGTT | 6.84 |
| PLK1 | gPLK1_10 | 1426 | GAGGACAACGACTTCGTGTTC | 8.52 |
| PLK1 | gPLK1_2 | 1418 | GCCGGTGGAGCCGCCGCCGGA | 2.01 |
| PLK1 | gPLK1_5 | 1421 | GGCAAGGGCGGCTTTGCCAAG | 28.41 |
| PLK1 | gPLK1_4 | 1420 | GGGCAAGGGCGGCTTTGCCAA | 28.24 |
| PLK1 | gPLK1_8 | 1424 | TCGAGGACAACGACTTCGTGT | 0.16 |
| PLK1 | gPLK1_3 | 1419 | TGGGCAAGGGCGGCTTTGCCA | 2.26 |
| TUBB | gTUBB_1 | 1430 | AACCATGAGGGAAATCGTGCA | 2.61 |
| TUBB | gTUBB_2 | 1431 | ACCATGAGGGAAATCGTGCAC | 68.4 |
| TUBB | gTUBB_3 | 1432 | TTCTCTGTAGGTGGCAAATAT | 18.67 |
| U6 | gU6_5 | 1411 | ATATATCTTGTGGAAAGGACG | 0.39 |
| U6 | gU6_2 | 1408 | GATTTCTTGGCTTTATATATC | 0.71 |
| U6 | gU6_4 | 1410 | GCTTTATATATCTTGTGGAAA | 0.37 |
| U6 | gU6_1 | 1407 | GTCCTTTCCACAAGATATATA | 68.1 |
| U6 | gU6_6 | 1412 | TATATCTTGTGGAAAGGACGA | 0.39 |
| U6 | gU6_7 | 1413 | TGGAAAGGACGAAACACCGTG | 0.24 |
| U6 | gU6_3 | 1409 | TTGGCTTTATATATCTTGTGG | 2.83 |

[0325] To provide sufficient targeting to the target nucleotide sequence, the spacer sequence can be 16 or more nucleotides in length. In certain embodiments, the spacer sequence is at least 16, 17, 18, 19, 20, 21, 22, 23, 24, 25, 26, 27, 28, 29, 30, 35, 40, 45, 50, or 75 nucleotides in length. In certain embodiments, the spacer sequence is shorter than or equal to 75, 50, 45, 40, 35, 30, 25, or 20 nucleotides in length. Shorter spacer sequence may be desirable for reducing off-target events. Accordingly, in certain embodiments, the spacer sequence is shorter than or equal to 21, 20, 19, 18, or 17 nucleotides. In certain embodiments, the spacer sequence is 17-30 nucleotides in length, e.g., 17-21, 17-22, 17-23, 17-24, 17-25, 17-30, 20-21, 20-22, 20-23, 20-24, 20-25, or 20-30 nucleotides in length. In certain embodiments, the spacer sequence is about 20 nucleotides in length. In certain embodiments, the spacer sequence is about 21 nucleotides in length. In certain embodiments, the spacer sequence is 20 nucleotides in length.

[0326] In certain embodiments, the spacer sequence comprises a portion of a spacer sequence listed in Tables 7-9, wherein the portion is 16, 17, 18, 19, or 20 nucleotides in length. In certain embodiments, the spacer sequence comprises nucleotides 1-16, 1-17, 1-18, 1-19, or 1-20 of a spacer sequence listed in Tables 7-9. In specific embodiments, the spacer sequence consists of nucleotides 1-16, 1-17, 1-18, 1-19, or 1-20 of a spacer sequence listed in Tables 7-9.

[0327] In certain embodiments, the spacer sequence is 21 nucleotides in length. In certain embodiments, the spacer sequence consists of a spacer sequence shown in Tables 7-9.

[0328] In certain embodiments, the spacer sequence, where it is longer than 21 nucleotides in length, comprises a spacer sequence shown in Tables 7-9 and one or more nucleotides. In certain embodiments, the one or more nucleotides are 3′ to the spacer sequence shown in Tables 7-9.

[0329] In certain embodiments, the spacer sequence is at least 70%, at least 75%, at least 80%, at least 85%, at least 90%, at least 93%, at least 94%, at least 95%, at least 96%, at least 97%, at least 98%, or at least 99% complementary to the target nucleotide sequence. In certain embodiments, the spacer sequence is 100% complementary to the target nucleotide sequence in the seed region (about 5 base pairs proximal to the PAM). In certain embodiments, the spacer sequence is 100% complementary to the target nucleotide sequence. The spacer sequences listed in Tables 7-9 are designed to be 100% complementary to the wild-type sequence of the corresponding target gene. Accordingly, it is contemplated that a spacer sequence useful for targeting a gene listed in Tables 7-9 can be at least 70%, at least 75%, at least 80%, at least 85%, at least 90%, at least 93%, at least 94%, at least 95%, at least 96%, at least 97%, at least 98%, or at least 99% identical to a corresponding spacer sequence listed in Tables 7-9, or a portion thereof disclosed herein. In certain embodiments, the spacer sequence is 1, 2, 3, 4, 5, 6, 7, 8, 9, or 10 nucleotides different from a sequence listed in Tables 7-9. In certain embodiments, the spacer sequence is 100% identical to a sequence listed in Tables 7-9 in the seed region (about 5 base pairs proximal to the PAM). It has been reported that compared to DNA binding, DNA cleavage is less tolerant to mismatches between the spacer sequence and the target nucleotide sequence (see, Klein et al. (2018) Cell Reports, 22:1413). Accordingly, in certain embodiments, a guide nucleic acid to be used with a Cas nuclease comprises a spacer sequence 100% complementary to the target nucleotide sequence. In certain embodiments, a guide nucleic acid to be used with a Cas nuclease comprises a spacer sequence listed in Tables 7-9, or a portion thereof disclosed herein.

[0330] The present invention also provides guide nucleic acids targeting human DHODH, PLK1, MVD, TUBB, or U6 gene comprising the spacer sequences provided below in Table 10. DHODH, PLK1, MVD, and TUBB are known to be essential genes. It is contemplated that the guide nucleic acids targeting these genes, particularly the ones that edit the respective genomic locus at hight efficiency (e.g., at least 50%, at least 60%, at least 70%, at least 80%, or at least 90%), can be used as positive controls for assessing transfection efficiency and other experimental processes. The spacer sequences targeting U6 in Table 10 are designed to hybridize with the promoter region of human U6 gene and can be used to assess expression of an inserted gene from the endogenous U6 promoter.

### V. Pharmaceutical Compositions

[0331] Provided herein is a composition (e.g., pharmaceutical composition) comprising a guide nucleic acid, an engineered, non-naturally occurring system, or a eukaryotic cell, such as a guide nucleic acid, an engineered, non-naturally occurring system, or a eukaryotic cell, disclosed herein. In certain embodiments, the composition comprises an RNP comprising a guide nucleic acid, such as a guide nucleic acid disclosed herein, and a Cas protein (e.g., Cas nuclease). In certain embodiments, the composition comprises a single guide nucleic acid, such as a single guide nucleic acid disclosed herein. In certain embodiments, the composition comprises an RNP comprising the single guide nucleic acid, and a Cas protein (e.g., Cas nuclease). In certain embodiments, the composition comprises an RNP comprising the targeter nucleic acid, the modulator nucleic acid, and a Cas protein (e.g., Cas nuclease). In certain embodiments, the composition comprises a complex of a targeter nucleic acid and a modulator nucleic acid, such as a complex of a targeter nucleic acid and a modulator nucleic acid disclosed herein. In certain embodiments, the composition comprises an RNP comprising the targeter nucleic acid, the modulator nucleic acid, and a Cas protein (e.g., Cas nuclease).

[0332] In certain embodiments provided herein is a method of producing a composition, the method comprising incubating a single guide nucleic acid, such as a single guide nucleic acid disclosed herein, with a Cas protein, thereby producing a complex of the single guide nucleic acid and the Cas protein (e.g., an RNP). In certain embodiments, the method further comprises purifying the complex (e.g., the RNP).

[0333] In certain embodiments, provided is a method of producing a composition, the method comprising incubating a targeter nucleic acid and a modulator nucleic acid, such as a targeter nucleic acid and a modulator nucleic acid disclosed herein, under suitable conditions, thereby producing a composition (e.g., pharmaceutical composition) comprising a complex of the targeter nucleic acid and the modulator nucleic acid. In certain embodiments, the method further comprises incubating the targeter nucleic acid and the modulator nucleic acid with a Cas protein (e.g., the Cas nuclease that the targeter nucleic acid and the modulator nucleic acid are capable of activating or a related Cas protein), thereby producing a complex of the targeter nucleic acid, the modulator nucleic acid, and the Cas protein (e.g., an RNP). In certain embodiments, the method further comprises purifying the complex (e.g., the RNP).

[0334] For therapeutic use, a guide nucleic acid, an engineered, non-naturally occurring system, a CRISPR expression system, or a cell comprising such system or modified by such system disclosed herein is combined with a pharmaceutically acceptable carrier. The term “pharmaceutically acceptable” as used herein can refer to those compounds, materials, compositions, and/or dosage forms which are, within the scope of sound medical judgment, suitable for use in contact with the tissues of human beings and animals without excessive toxicity, irritation, allergic response, or other problem or complication, commensurate with a reasonable benefit-to-risk ratio.

[0335] The term “pharmaceutically acceptable carrier” as used herein includes buffers, carriers, and excipients suitable for use in contact with the tissues of human beings and animals without excessive toxicity, irritation, allergic response, or other problem or complication, commensurate with a reasonable benefit/risk ratio. Pharmaceutically acceptable carriers include any of the standard pharmaceutical carriers, such as a phosphate buffered saline solution, water, emulsions (e.g., such as an oil/water or water/oil emulsions), and various types of wetting agents. The compositions also can include stabilizers and preservatives. For examples of carriers, stabilizers and adjuvants, see, e.g., Martin, Remington's Pharmaceutical Sciences, 15th Ed., Mack Publ. Co., Easton, PA (1975). Pharmaceutically acceptable carriers include buffers, solvents, dispersion media, coatings, isotonic and absorption delaying agents, or the like, that are compatible with pharmaceutical administration. The use of such media and agents for pharmaceutically active substances is known in the art.

[0336] In certain embodiments, a pharmaceutical composition disclosed herein comprises a salt, e.g., NaCl, MgCl2, KCl, MgSO4, etc.: a buffering agent, e.g., a Tris buffer, N-(2-Hydroxyethyl)piperazine-N′-(2-ethanesulfonic acid) (HEPES), 2-(N-Morpholino)ethanesulfonic acid (MES), MES sodium salt, 3-(N-Morpholino) propanesulfonic acid (MOPS), N-tris[Hydroxymethyl] methyl-3-aminopropanesulfonic acid (TAPS), etc.; a solubilizing agent; a detergent, e.g., a non-ionic detergent such as Tween-20, etc.; a nuclease inhibitor; or the like. For example, in certain embodiments, a subject composition comprises a subject DNA-targeting RNA, e.g., gRNA, and a buffer for stabilizing nucleic acids.

[0337] In certain embodiments, a pharmaceutical composition may contain formulation materials for modifying, maintaining or preserving, for example, the pH, osmolarity, viscosity, clarity, color, isotonicity, odor, sterility, stability, rate of dissolution or release, adsorption or penetration of the composition. In such embodiments, suitable formulation materials include, but are not limited to, amino acids (such as glycine, glutamine, asparagine, arginine or lysine); antimicrobials; antioxidants (such as ascorbic acid, sodium sulfite or sodium hydrogen-sulfite); buffers (such as borate, bicarbonate, Tris-HCl, citrates, phosphates or other organic acids); bulking agents (such as mannitol or glycine); chelating agents (such as ethylenediamine tetraacetic acid (EDTA)); complexing agents (such as caffeine, polyvinylpyrrolidone, beta-cyclodextrin or hydroxypropyl-beta-cyclodextrin); fillers; monosaccharides: disaccharides; and other carbohydrates (such as glucose, mannose or dextrins); proteins (such as serum albumin, gelatin or immunoglobulins); coloring, flavoring and diluting agents; emulsifying agents; hydrophilic polymers (such as polyvinylpyrrolidone); low molecular weight polypeptides; salt-forming counterions (such as sodium); preservatives (such as benzalkonium chloride, benzoic acid, salicylic acid, thimerosal, phenethyl alcohol, methylparaben, propylparaben, chlorhexidine, sorbic acid or hydrogen peroxide); solvents (such as glycerin, propylene glycol or polyethylene glycol); sugar alcohols (such as mannitol or sorbitol); suspending agents; surfactants or wetting agents (such as pluronics, PEG, sorbitan esters, polysorbates such as polysorbate 20, polysorbate, triton, tromethamine, lecithin, cholesterol, tyloxapal); stability enhancing agents (such as sucrose or sorbitol); tonicity enhancing agents (such as alkali metal halides, preferably sodium or potassium chloride, mannitol sorbitol); delivery vehicles; diluents; excipients and/or pharmaceutical adjuvants (see, Remington's Pharmaceutical Sciences, 18th ed. (Mack Publishing Company, 1990).

[0338] In certain embodiments, a pharmaceutical composition may contain nanoparticles, e.g., polymeric nanoparticles, liposomes, or micelles (See Anselmo et al. (2016) Bioeng. Transl. Med. 1:10-29). In certain embodiment, the pharmaceutical composition comprises an inorganic nanoparticle. Exemplary inorganic nanoparticles include, e.g., magnetic nanoparticles (e.g., Fe3MnO2) or silica. The outer surface of the nanoparticle can be conjugated with a positively charged polymer (e.g., polyethylenimine, polylysine, polyserine) which allows for attachment (e.g., conjugation or entrapment) of payload. In certain embodiment, the pharmaceutical composition comprises an organic nanoparticle (e.g., entrapment of the payload inside the nanoparticle). Exemplary organic nanoparticles include, e.g., SNALP liposomes that contain cationic lipids together with neutral helper lipids which are coated with polyethylene glycol (PEG) and protamine and nucleic acid complex coated with lipid coating. In certain embodiment, the pharmaceutical composition comprises a liposome, for example, a liposome disclosed in International (PCT) Application Publication No. WO 2015/148863.

[0339] In certain embodiments, the pharmaceutical composition comprises a targeting moiety to increase target cell binding or update of nanoparticles and liposomes. Exemplary targeting moieties include cell specific antigens, monoclonal antibodies, single chain antibodies, aptamers, polymers, sugars, and cell penetrating peptides. In certain embodiments, the pharmaceutical composition comprises a fusogenic or endosome-destabilizing peptide or polymer.

[0340] In certain embodiments, a pharmaceutical composition may contain a sustained- or controlled-delivery formulation. Techniques for formulating sustained- or controlled-delivery means, such as liposome carriers, bio-erodible microparticles or porous beads and depot injections, are also known to those skilled in the art. Sustained-release preparations may include, e.g., porous polymeric microparticles or semipermeable polymer matrices in the form of shaped articles, e.g., films, or microcapsules. Sustained release matrices may include polyesters, hydrogels, polylactides, copolymers of L-glutamic acid and gamma ethyl-L-glutamate, poly (2-hydroxyethyl-inethacrylate), ethylene vinyl acetate, or poly-D(-)-3-hydroxybutyric acid. Sustained release compositions may also include liposomes that can be prepared by any of several methods known in the art.

[0341] A pharmaceutical composition of the invention can be administered by a variety of methods known in the art. The route and/or mode of administration vary depending upon the desired results. Administration can be intravenous, intramuscular, intraperitoneal, or subcutaneous, or administered proximal to the site of the target. The pharmaceutically acceptable carrier should be suitable for intravenous, intramuscular, subcutaneous, parenteral, spinal or epidermal administration (e.g., by injection or infusion). Depending on the route of administration, the active compound (e.g., the guide nucleic acid, engineered, non-naturally occurring system, or CRISPR expression system disclosed herein) may be coated in a material to protect the compound from the action of acids and other natural conditions that may inactivate the compound.

[0342] Formulation components suitable for parenteral administration include a sterile diluent such as water for injection, saline solution, fixed oils, polyethylene glycols, glycerin, propylene glycol or other synthetic solvents; antibacterial agents such as benzyl alcohol or methyl parabens; antioxidants such as ascorbic acid or sodium bisulfite; chelating agents such as EDTA; buffers such as acetates, citrates or phosphates; and agents for the adjustment of tonicity such as sodium chloride or dextrose.

[0343] For intravenous administration, suitable carriers include physiological saline, bacteriostatic water, Cremophor ELTM (BASF, Parsippany, NJ) or phosphate buffered saline (PBS). The carrier should be stable under the conditions of manufacture and storage, and should be preserved against microorganisms. The carrier can be a solvent or dispersion medium containing, for example, water, ethanol, polyol (for example, glycerol, propylene glycol, and liquid polyetheylene glycol), and suitable mixtures thereof.

[0344] Pharmaceutical formulations preferably are sterile. Sterilization can be accomplished by any suitable method, e.g., filtration through sterile filtration membranes. Where the composition is lyophilized, filter sterilization can be conducted prior to or following lyophilization and reconstitution. In certain embodiments, the pharmaceutical composition is lyophilized, and then reconstituted in buffered saline, at the time of administration.

[0345] Pharmaceutical compositions of the invention can be prepared in accordance with methods well known and routinely practiced in the art. See, e.g., Remington: The Science and Practice of Pharmacy, Mack Publishing Co., 20th ed., 2000; and Sustained and Controlled Release Drug Delivery Systems, J. R. Robinson, ed., Marcel Dekker, Inc., New York, 1978. Pharmaceutical compositions are preferably manufactured under GMP conditions. Typically, a therapeutically effective dose or efficacious dose of the guide nucleic acid, engineered, non-naturally occurring system, or CRISPR expression system disclosed herein is employed in the pharmaceutical compositions of the invention. The compositions disclosed herein are formulated into pharmaceutically acceptable dosage forms by conventional methods known to those of skill in the art. Dosage regimens are adjusted to provide the optimum desired response (e.g., a therapeutic response). For example, a single bolus may be administered, several divided doses may be administered over time or the dose may be proportionally reduced or increased as indicated by the exigencies of the therapeutic situation. It is especially advantageous to formulate parenteral compositions in dosage unit form for ease of administration and uniformity of dosage. Dosage unit form as used herein refers to physically discrete units suited as unitary dosages for the subjects to be treated: each unit contains a predetermined quantity of active compound calculated to produce the desired therapeutic effect in association with the required pharmaceutical carrier.

[0346] Actual dosage levels of the active ingredients in the pharmaceutical compositions of the invention can be varied so as to obtain an amount of the active ingredient which is effective to achieve the desired therapeutic response for a particular patient, composition, and mode of administration, without being toxic to the patient. The selected dosage level depends upon a variety of pharmacokinetic factors including the activity of the particular compositions disclosed herein employed, or the ester, salt or amide thereof, the route of administration, the time of administration, the rate of excretion of the particular compound being employed, the duration of the treatment, other drugs, compounds and/or materials used in combination with the particular compositions employed, the age, sex, weight, condition, general health and prior medical history of the patient being treated, and like factors.

### VI. Therapeutic Uses

[0347] Guide nucleic acids, engineered, non-naturally occurring systems, and the CRISPR expression systems, e.g., as disclosed herein, are useful for targeting, editing, and/or modifying the genomic DNA in a cell or organism. These guide nucleic acids and systems, as well as a cell comprising one of the systems or a cell whose genome has been modified by one of the systems, can be used to treat a disease or disorder in which modification of genetic or epigenetic information is desirable. Accordingly, provided herein is a method of treating a disease or disorder, the method comprising administering to a subject in need thereof a guide nucleic acid, a non-naturally occurring system, a CRISPR expression system, or a cell disclosed herein.

[0348] The term “subject” includes human and non-human animals. Non-human animals include all vertebrates, e.g., mammals and non-mammals, such as non-human primates, sheep, dog, cow, chickens, amphibians, and reptiles. Except when noted, the terms “patient” or “subject” are used herein interchangeably.

[0349] The terms “treatment”, “treating”, “treat”, “treated”, or the like, as used herein, can refer to obtaining a desired pharmacologic and/or physiologic effect. The effect may be therapeutic in terms of a partial or complete cure for a disease and/or adverse effect attributable to the disease or delaying the disease progression. “Treatment”, as used herein, covers any treatment of a disease in a mammal, e.g., in a human, and includes: (a) inhibiting the disease, i.e., arresting its development; and (b) relieving the disease, i.e., causing regression of the disease. It is understood that a disease or disorder may be identified by genetic methods and treated prior to manifestation of any medical symptom.

[0350] For minimization of toxicity and off-target effect, it can be important to control the concentration of the CRISPR-Cas system delivered. Optimal concentrations can be determined by testing different concentrations in a cellular, tissue, or non-human eukaryote animal model and using deep sequencing to analyze the extent of modification at potential off-target genomic loci. The concentration that gives the highest level of on-target modification while minimizing the level of off-target modification is generally selected for ex vivo or in vivo delivery.

[0351] It is understood that the guide nucleic acid, the engineered, non-naturally occurring system, and the CRISPR expression system disclosed herein can be used to treat any suitable disease or disorder that can be improved by the system in a cell.

[0352] For therapeutic purposes, certain methods disclosed herein is particularly suitable for editing or modifying a proliferating cell, such as a stem cell (e.g., a hematopoietic stem cell), a progenitor cell (e.g., a hematopoietic progenitor cell or a lymphoid progenitor cell), or a memory cell (e.g., a memory T cell). Given that such cell is delivered to a subject and will proliferate in vivo, tolerance to off-target events is low. Prior to delivery, however, it is possible to assess the on-target and off-target events, thereby selecting one or more colonies that have the desired edit or modification and lack any undesired edit or modification. Therefore, lower editing or modifying efficiency can be tolerated for such cell. The engineered, non-naturally occurring system of the present invention has the advantage of increasing or decreasing the efficiency of nucleic acid cleavage by, for example, adjusting the hybridization of dual guide nucleic acids. As a result, it can be used to minimize off-target events when creating genetically engineered proliferating cells.

[0353] In certain embodiments, the guide nucleic acid, the engineered, non-naturally occurring system, and/or the CRISPR expression system disclosed herein can be used to engineer an immune cell. Immune cells include but are not limited to lymphocytes (e.g., B lymphocytes or B cells, T lymphocytes or T cells, and natural killer cells), myeloid cells (e.g., monocytes, macrophages, eosinophils, mast cells, basophils, and granulocytes), and the stem and progenitor cells that can differentiate into these cell types (e.g., hematopoietic stem cells, hematopoietic progenitor cells, and lymphoid progenitor cells). The cells can include autologous cells derived from a subject to be treated, or alternatively allogenic cells derived from a donor.

[0354] In certain embodiments, the immune cell is a T cell, which can be, for example, a cultured T cell, a primary T cell, a T cell from a cultured T cell line (e.g., Jurkat, SupTi), or a T cell obtained from a mammal, for example, from a subject to be treated. If obtained from a mammal, the T cell can be obtained from numerous sources, including but not limited to blood, bone marrow, lymph node, the thymus, or other tissues or fluids. T cells can also be enriched or purified. The T cell can be any type of T cell and can be of any developmental stage, including but not limited to, CD4⁺/CD8⁺ double positive T cells, CD4⁺ helper T cells (e.g., Th1 and Th2 cells), CD8⁺ T cells (e.g., cytotoxic T cells), tumor infiltrating lymphocytes (TILs), memory T cells (e.g., central memory T cells and effector memory T cells), regulatory T cells, naive T cells, or the like.

[0355] In certain embodiments, an immune cell, e.g., a T cell, is engineered to express an exogenous gene. For example, in certain embodiments, an engineered CRISPR system disclosed herein may catalyze DNA cleavage at the gene locus, allowing for site-specific integration of the exogenous gene at the gene locus by HDR.

[0356] In certain embodiments, an immune cell, e.g., a T cell, is engineered to express a chimeric antigen receptor (CAR), i.e., the T cell comprises an exogenous nucleotide sequence encoding a CAR. As used herein, the term “chimeric antigen receptor” or “CAR” includes any artificial receptor including an antigen-specific binding moiety and one or more signaling chains derived from an immune receptor. CARs can comprise a single chain fragment variable (scFv) of an antibody specific for an antigen coupled via hinge and transmembrane regions to cytoplasmic domains of T cell signaling molecules, e.g. a T cell costimulatory domain (e.g., from CD28, CD137, OX40, ICOS, or CD27) in tandem with a T cell triggering domain (e.g. from CD35). A T cell expressing a chimeric antigen receptor is referred to as a CAR T cell. Exemplary CAR T cells include CD19 targeted CTL019 cells (sec. Grupp et al. (2015) BLOOD. 126:4983), 19-28% cells (see, Park et al. (2015) J. CLIN. ONCOL., 33:7010), and KTE-C19 cells (sec. Locke et al. (2015) BLOOD. 126:3991). Additional exemplary CAR T cells are described in U.S. Pat. Nos. 7,446,190, 8,399,645, 8,906,682, 9,181,527, 9,272,002, 9,266,960, 10,253,086, 10,640,569, and 10,808,035, and International (PCT) Publication Nos. WO 2013/142034, WO 2015/120180, WO 2015/188141, WO 2016/120220, and WO 2017/040945. Exemplary approaches to express CARs using CRISPR systems are described in Hale et al. (2017) MOL THER METHODS CLIN DEV., 4:192. MacLeod et al. (2017) MOL THER. 25:949, and Eyquem et al. (2017) NATURE. 543:113.

[0357] In certain embodiments, an immune cell, e.g., a T cell, binds an antigen, e.g., a cancer antigen, through an endogenous T cell receptor (TCR). In certain embodiments, an immune cell. e.g., a T cell, is engineered to express an exogenous TCR, e.g., an exogenous naturally occurring TCR or an exogenous engineered TCR. T cell receptors comprise two chains referred to as the α- and β-chains, that combine on the surface of a T cell to form a heterodimeric receptor that can recognize MHC-restricted antigens. Each of α- and β-chain comprises a constant region and a variable region. Each variable region of the α- and β-chains defines three loops, referred to as complementary determining regions (CDRs) known as CDR₁, CDR₂, and CDR₃ that confer the T cell receptor with antigen binding activity and binding specificity.

[0358] In certain embodiments, a CAR or TCR binds a cancer antigen selected from B-cell maturation antigen (BCMA), mesothelin, prostate specific membrane antigen (PSMA), prostate stem cell antigen (PSCA), carbonic anhydrase IX (CAIX), carcinoembryonic antigen (CEA). CD5, CD7, CD10, CD19, CD20, CD22, CD30, CD33, CD34, CD38, CD41, CD44, CD49f, CD56, CD70, CD74, CD123, CD133, CD138, epithelial glycoprotein2 (EGP 2), epithelial glycoprotein-40 (EGP-40), epithelial cell adhesion molecule (EpCAM), receptor-type tyrosine-protein kinase (FLT3), folate-binding protein (FBP), fetal acetylcholine receptor (AChR), folate receptor-a and β (FRa and β), Ganglioside G2 (GD2), Ganglioside G3 (GD3), epidermal growth factor receptor 2 (HER-2/ERB2), epidermal growth factor receptor vIII (EGFRvIII), ERB3, ERB4, human telomerase reverse transcriptase (hTERT), Interleukin-13 receptor subunit alpha-2 (IL-13Ra2), K-light chain, kinase insert domain receptor (KDR), Lewis A (CA19.9), Lewis Y (LeY), LI cell adhesion molecule (LICAM), melanoma-associated antigen 1 (melanoma antigen family A1, MAGE-A1), Mucin 16 (MUC-16), Mucin 1 (MUC-1; e.g., a truncated MUC-1), KG2D ligands, cancer-testis antigen NY-ESO-1, oncofetal antigen (h5T4), tumor-associated glycoprotein 72 (TAG-72), vascular endothelial growth factor R2 (VEGF-R2), Wilms tumor protein (WT-1), type 1 tyrosine-protein kinase transmembrane receptor (ROR1), B7-H3 (CD276), B7-H6 (Nkp30), Chondroitin sulfate proteoglycan-4 (CSPG4), DNAX Accessory Molecule (DNAM-1), Ephrin type A Receptor 2 (EpHA2), Fibroblast Associated Protein (FAP), Gp100/HLA-A2, Glypican 3 (GPC3), HA-IH, HERK-V, IL-1 IRa, Latent Membrane Protein 1 (LMP1), Neural cell-adhesion molecule (N-CAM/CD56), and Trail Receptor (TRAIL-R).

[0359] Genetic loci suitable for insertion of a CAR- or exogenous TCR-encoding sequence include but are not limited to safe harbor loci (e.g., the AAVS1 locus) TCR subunit loci (e.g., the TCRα constant (TRAC) locus, the TCRβ constant 1 (TRBC1) locus, and the TCRβ constant 2 (TRBC2) locus). It is understood that insertion in the TRAC locus reduces tonic CAR signaling and enhances T cell potency (see, Eyquem et al. (2017) NATURE, 543:113). Furthermore, inactivation of the endogenous TRAC, TRBC1, or TRBC2 gene may reduce a graft-versus-host disease (GVHD) response, thereby allowing use of allogeneic T cells as starting materials for preparation of CAR-T cells. Accordingly, in certain embodiments, an immune cell, e.g., a T cell, is engineered to have reduced expression of an endogenous TCR or TCR subunit, e.g., TRAC, TRBC1, and/or TRBC2. The cell may be engineered to have partially reduced or no expression of the endogenous TCR or TCR subunit. For example, in certain embodiments, the immune cell, e.g., a T cell, is engineered to have less than 80% (e.g., less than 70%, less than 60%, less than 50%, less than 40%, less than 30%, less than 20%, less than 10%, or less than 5%) of the expression of the endogenous TCR or TCR subunit relative to a corresponding unmodified or parental cell. In certain embodiments, the immune cell, e.g., a T cell, is engineered to have no detectable expression of the endogenous TCR or TCR subunit. Exemplary approaches to reduce expression of TCRs using CRISPR systems are described in U.S. Pat. No. 9,181,527, Liu et al. (2017) CELL RES, 27:154, Ren et al. (2017) CLIN CANCER RES, 23:2255, Cooper et al. (2018) LEUKEMIA, 32:1970, and Ren et al. (2017) ONCOTARGET, 8:17002.

[0360] It is understood that certain immune cells, such as T cells, also express major histocompatibility complex (MHC) or human leukocyte antigen (HLA) genes, and inactivation of these endogenous gene may reduce an immune response, thereby allowing use of allogeneic T cells as starting materials for preparation of CAR-T cells. Accordingly, in certain embodiments, an immune cell, e.g., a T-cell, is engineered to have reduced expression of one or more endogenous class I or class II MHCs or HLAs (e.g., beta 2-microglobulin (B2M), class II major histocompatibility complex transactivator (CIITA)). The cell may be engineered to have partially reduced or no expression of an endogenous MHC or HLA. For example, in certain embodiments, the immune cell, e.g., a T-cell, is engineered to have less than less than 80% (e.g., less than 70%, less than 60%, less than 50%, less than 40%, less than 30%, less than 20%, less than 10%, or less than 5%) of the expression of endogenous MHC (e.g., B2M, CIITA) relative to a corresponding unmodified or parental cell. In certain embodiments, the immune cell, e.g., a T cell, is engineered to have no detectable expression of an endogenous MHC (e.g., B2M, CIITA). In certain cases, a cell may be engineered to have expression of, e.g., HLA-E and/or HLA-G, in order to avoid attack by natural killer (NK) cells. Exemplary approaches to reduce expression of MHCs using CRISPR systems are described in Liu et al. (2017) CELL RES, 27:154, Ren et al. (2017) CLIN CANCER RES, 23:2255, and Ren et al. (2017) ONCOTARGET, 8:17002.

[0361] Other genes that may be inactivated include but are not limited to CD3, CD52, and deoxycytidine kinase (DCK). For example, inactivation of DCK may render the immune cells (e.g., T cells) resistant to purine nucleotide analogue (PNA) compounds, which are often used to compromise the host immune system in order to reduce a GVHD response during an immune cell therapy. In certain embodiments, the immune cell, e.g., a T-cell, is engineered to have less than less than 80% (e.g., less than 70%, less than 60%, less than 50%, less than 40%, less than 30%, less than 20%, less than 10%, or less than 5%) of the expression of endogenous CD52 or DCK relative to a corresponding unmodified or parental cell.

[0362] It is understood that the activity of an immune cell (e.g., T cell) may be enhanced by inactivating or reducing the expression of an immune suppressor such as an immune checkpoint protein. Accordingly, in certain embodiments, an immune cell, e.g., a T cell, is engineered to have reduced expression of an immune checkpoint protein. Exemplary immune checkpoint proteins expressed by wild-type T cells include but are not limited to PDCD1 (PD-1), CTLA4, ADORA2A (A2AR), B7-H3, B7-H4, BTLA, KIR, LAG3, HAVCR2 (TIM3), TIGIT, VISTA, PTPN6 (SHP-1), and FAS. The cell may be modified to have partially reduced or no expression of the immune checkpoint protein. For example, in certain embodiments, the immune cell, e.g., a T cell, is engineered to have less than 80% (e.g., less than 70%, less than 60%, less than 50%, less than 40%, less than 30%, less than 20%, less than 10%, or less than 5%) of the expression of the immune checkpoint protein relative to a corresponding unmodified or parental cell. In certain embodiments, the immune cell, e.g., a T cell, is engineered to have no detectable expression of the immune checkpoint protein. Exemplary approaches to reduce expression of immune checkpoint proteins using CRISPR systems are described in International (PCT) Publication No. WO 2017/017184, Cooper et al. (2018) LEUKEMIA, 32:1970, Su et al. (2016) ONCOIMMUNOLOGY, 6:1249558, and Zhang et al. (2017) FRONT MED, 11:554.

[0363] The immune cell can be engineered to have reduced expression of an endogenous gene, e.g., an endogenous genes described above, by gene editing or modification. For example, in certain embodiments, an engineered CRISPR system disclosed herein may result in DNA cleavage at a gene locus, thereby inactivating the targeted gene. In other embodiments, an engineered CRISPR system disclosed herein may be fused to an effector domain (e.g., a transcriptional repressor or histone methylase) to reduce the expression of the target gene.

[0364] The immune cell can also be engineered to express an exogenous protein (besides an antigen-binding protein described above) at the locus of a human ADORA2A, B2M, CD52, CIITA, CTLA4, DCK, FAS, HAVCR2, LAG3, PDCD1, PTPN6, TIG1T, TRAC, TRBC1, TRBC2, CARD11, CD247, IL7R, LCK, or PLCG1 gene.

[0365] In certain embodiments, an immune cell, e.g., a T cell, is modified to express a dominant-negative form of an immune checkpoint protein. In certain embodiments, the dominant-negative form of the checkpoint inhibitor can act as a decoy receptor to bind or otherwise sequester the natural ligand that would otherwise bind and activate the wild-type immune checkpoint protein. Examples of engineered immune cells, for example, T cells containing dominant-negative forms of an immune suppressor are described, for example, in International (PCT) Publication No. WO 2017/040945.

[0366] In certain embodiments, an immune cell, e.g., a T cell, is modified to express a gene (e.g., a transcription factor, a cytokine, or an enzyme) that regulates the survival, proliferation, activity, or differentiation (e.g., into a memory cell) of the immune cell. In certain embodiments, the immune cell is modified to express TET2, FOXO1, IL-12, IL-15, IL-18, IL-21, IL-7, GLUT1, GLUT3, HK1, HK2, GAPDH, LDHA, PDK1, PKM2, PFKFB3, PGK1, ENO1, GYSI, and/or ALDOA. In certain embodiments, the modification is an insertion of a nucleotide sequence encoding the protein operably linked to a regulatory element. In certain embodiments, the modification is a substitution of a single nucleotide polymorphism (SNP) site in the endogenous gene. In certain embodiments, an immune cell, e.g., a T cell, is modified to express a variant of a gene, for example, a variant that has greater activity than the respective wild-type gene. In certain embodiments, the immune cell is modified to express a variant of CARDI1, CD247, IL7R, LCK, or PLCG1. For example, certain gain-of-function variants of IL7R were disclosed in Zenatti et al., (2011) NAT. GENET. 43 (10): 932-39. The variant can be expressed from the native locus of the respective wild-type gene by delivering an engineered system described herein for targeting the native locus in combination with a donor template that carries the variant or a portion thereof.

[0367] In certain embodiments, an immune cell, e.g., a T cell, is modified to express a protein (e.g., a cytokine or an enzyme) that regulates the microenvironment that the immune cell is designed to migrate to (e.g., a tumor microenvironment). In certain embodiments, the immune cell is modified to express CA9, CA12, a V-ATPase subunit, NHE1, and/or MCT-1.

### A. Gene Therapies

[0368] It is understood that the engineered, non-naturally occurring system and CRISPR expression system, e.g., as disclosed herein, can be used to treat a genetic disease or disorder, i.e., a disease or disorder associated with or otherwise mediated by an undesirable mutation in the genome of a subject.

[0369] Exemplary genetic diseases or disorders include age-related macular degeneration, adrenoleukodystrophy (ALD), Alagille syndrome, alpha-1-antitrypsin deficiency, argininemia, argininosuccinic aciduria, ataxia (e.g., Friedreich ataxia, spinocerebellar ataxias, ataxia telangiectasia, essential tremor, spastic paraplegia), autism, biliary atresia, biotinidase deficiency, carbamoyl phosphate synthetase I deficiency, carbohydrate deficient glycoprotein syndrome (CDGS), a central nervous system (CNS)-related disorder (e.g., Alzheimer's disease, amyotrophic lateral sclerosis (ALS), canavan disease (CD), ischemia, multiple sclerosis (MS), neuropathic pain, Parkinson's disease), Bloom's syndrome, cancer, Charcot-Marie-Tooth disease (e.g., peroneal muscular atrophy, hereditary motor sensory neuropathy), congenital hepatic porphyria, citrullinemia, Crigler-Najjar syndrome, cystic fibrosis (CF), Dentatorubro-Pallidoluysian Atrophy (DRPLA), diabetes insipidus, Fabry, familial hypercholesterolemia (LDL receptor defect), Fanconi's anemia, fragile X syndrome, a fatty acid oxidation disorder, galactosemia, glucose-6-phosphate dehydrogenase (G6PD), glycogen storage diseases (e.g., type I (glucose-6-phosphatase deficiency, Von Gierke II (alpha glucosidase deficiency, Pompe), III (debrancher enzyme deficiency, Cori), IV (brancher enzyme deficiency, Anderson), V (muscle glycogen phosphorylase deficiency, McArdle), VII (muscle phosphofructokinase deficiency, Tauri), VI (liver phosphorylase deficiency, Hers), IX (liver glycogen phosphorylase kinase deficiency)), hemophilia A (associated with defective factor VIII), hemophilia B (associated with defective factor IX), Huntington's disease, glutaric aciduria, hypophosphatemia, Krabbe, lactic acidosis, Lafora disease, Leber's Congenital Amaurosis, Lesch Nyhan syndrome, a lysosomal storage disease, metachromatic leukodystrophy disease (MLD), mucopolysaccharidosis (MPS) (e.g., Hunter syndrome, Hurler syndrome, Maroteaux-Lamy syndrome, Sanfilippo syndrome, Scheie syndrome, Morquio syndrome, other, MPSI, MPSII, MPSIII, MSIV, MPS 7), a muscular/skeletal disorder (e.g., muscular dystrophy, Duchenne muscular dystrophy), myotonic Dystrophy (DM), neoplasia, N-acetylglutamate synthase deficiency, ornithine transcarbamylase deficiency, phenylketonuria, primary open angle glaucoma, retinitis pigmentosa, schizophrenia, Severe Combined Immune Deficiency (SCID), Spinobulbar Muscular Atrophy (SBMA), sickle cell anemia, Usher syndrome, Tay-Sachs disease, thalassemia (e.g., β-Thalassemia), trinucleotide repeat disorders, tyrosinemia, Wilson's disease, Wiskott-Aldrich syndrome, X-linked chronic granulomatous disease (CGD), X-linked severe combined immune deficiency, and xeroderma pigmentosum.

[0370] Additional exemplary genetic diseases or disorders and associated information are available on the world wide web at kumc.edu/gec/support, genome.gov/10001200, and ncbi.nlm.nih.gov/books/NBK22183/. Additional exemplary genetic diseases or disorders, associated genetic mutations, and gene therapy approaches to treat genetic diseases or disorders are described in International (PCT) Publication Nos. WO 2013/126794, WO 2013/163628, WO 2015/048577, WO 2015/070083, WO 2015/089354, WO 2015/134812, WO 2015/138510, WO 2015/148670, WO 2015/148860, WO 2015/148863, WO 2015/153780, WO 2015/153789, and WO 2015/153791, U.S. Pat. Nos. 8,383,604, 8,859,597, 8,956,828, 9,255,130, and 9,273,296, and U.S. Patent Application Publication Nos. 2009/0222937, 2009/0271881, 2010/0229252, 2010/0311124, 2011/0016540, 2011/0023139, 2011/0023144, 2011/0023145, 2011/0023146, 2011/0023153, 2011/0091441, 2012/0159653, and 2013/0145487.

### B. Immune Cell Engineering

[0371] It is understood that the engineered, non-naturally occurring systems comprising ssODNs disclosed herein can be used to engineer an immune cell. Immune cells include but are not limited to lymphocytes (e.g., B lymphocytes or B cells, T lymphocytes or T cells, and natural killer cells), myeloid cells (e.g., monocytes, macrophages, cosinophils, mast cells, basophils, and granulocytes), and the stem and progenitor cells that can differentiate into these cell types (e.g., hematopoietic stem cells, hematopoietic progenitor cells, and lymphoid progenitor cells). The cells can include autologous cells derived from a subject to be treated, or alternatively allogenic cells derived from a donor.

[0372] It is understood that CRISPR systems comprising ssODNs disclosed herein can be used to treat any disease or disorder that can be improved by editing or modifying a target sequence: exemplary genes containing target sequences to be modified for therapeutic purposes include ADORA2A, ALPNR, B2M, BBS1, CALR, CARD11, CD3E, CD3G, CD38, CD40LG, CD52, CD58, CD247, CIITA, COL17A1, CSF1R, CSF2, CTLA4, DCK, DEFB134, DHODH, ERAP1, ERAP2, FAS, mir-101-2, HAVCR2 (also called TIM3), IFNGR1, IFNGR2, IL7R, JAK1, JAK2, LAG3, LCK, LCK1, MLANA, MVD, PDCD1 (also called PD-1), PLCG1, PLK1, PSMB5, PSMB8, PSMB9, PTCD2, PTPN1, PTPN6, PTPN11, RFX5, RFXAP, RPL23, RXANK, SOX10, SRP54, STAT1, Tap1, TAP2, TAPBP, TGFBR2, TIGIT, TIM3, TRAC, TRBC1, TRBC1+2, TRBC2, TUBB, TWF1, and/or U6 gene in a cell.

[0373] In certain embodiments, the immune cell is a T cell, which can be, for example, a cultured T cell, a primary T cell, a T cell from a cultured T cell line (e.g., Jurkat, SupTi), or a T cell obtained from a mammal, for example, from a subject to be treated. If obtained from a mammal, the T cell can be obtained from numerous sources, including but not limited to blood, bone marrow, lymph node, the thymus, or other tissues or fluids. T cells can also be enriched or purified. The T cell can be any type of T cell and can be of any developmental stage, including but not limited to, CD4+/CD8+double positive T cells, CD4+ helper T cells (e.g., Th1 and Th2 cells), CD8+ T cells (e.g., cytotoxic T cells), tumor infiltrating lymphocytes (TILs), memory T cells (e.g., central memory T cells and effector memory T cells), regulatory T cells, naive T cells, and the like.

[0374] In certain embodiments, an immune cell, e.g., a T cell, is engineered to express an exogenous gene. For example, in certain embodiments, an engineered CRISPR system disclosed herein may be used to engineer an immune cell to express an exogenous gene. For example, in certain embodiments, the guide nucleic acid, the engineered, non-naturally occurring system, and the CRISPR expression system disclosed herein may be used to engineer an immune cell to express an exogenous gene at the locus of a human ADORA2A, ALPNR, B2M, BBS1, CALR, CARD11, CD3E, CD3G, CD38, CD40LG, CD52, CD58, CD247, CIITA, COL17A1, CSF1R, CSF2, CTLA4, DCK, DEFB134, DHODH, ERAP1, ERAP2, FAS, mir-101-2, HAVCR2 (also called TIM3), IFNGR1, IFNGR2, IL7R, JAKI, JAK2, LAG3, LCK, LCK1, MLANA, MVD, PDCD1 (also called PD-1), PLCG1, PLK1, PSMB5, PSMB8, PSMB9, PTCD2, PTPN1, PTPN6, PTPN11, RFX5, RFXAP, RPL23, RXANK, SOX10, SRP54, STAT1, Tap1, TAP2, TAPBP, TGFBR2, TIGIT, TIM3, TRAC, TRBC1, TRBC1+2, TRBC2, TUBB, TWF1, and/or U6 gene. For example, in certain embodiments, an engineered CRISPR system comprising ssODNs disclosed herein may catalyze DNA cleavage at a gene locus, allowing for site-specific integration of the exogenous gene at the gene locus by HDR, while decreasing off-target effects by incorporating wild-type gene back into off-target cleaved sites by HDR.

[0375] In certain embodiments, an immune cell, e.g., a T cell, is engineered to express a chimeric antigen receptor (CAR), i.e., the T cell comprises an exogenous nucleotide sequence encoding a CAR. As used herein, the term “chimeric antigen receptor” or “CAR” includes any artificial receptor including an antigen-specific binding moiety and one or more signaling chains derived from an immune receptor. CARs can comprise a single chain fragment variable (scFv) of an antibody specific for an antigen coupled via hinge and transmembrane regions to cytoplasmic domains of T cell signaling molecules, e.g. a T cell costimulatory domain (e.g., from CD28, CD137, OX40, ICOS, or CD27) in tandem with a T cell triggering domain (e.g. from CD3(E∂). A T cell expressing a chimeric antigen receptor is referred to as a CAR T cell. Exemplary CAR T cells include CD19 targeted CTL019 cells (see. Grupp et al. (2015) BLOOD. 126:4983). 19-282 cells (see, Park et al. (2015) J. CLIN. ONCOL., 33:7010), and KTE-C19 cells (see. Locke et al. (2015) BLOOD, 126:3991). Additional exemplary CAR T cells are described in U.S. Pat. Nos. 8,399,645, 8,906,682, 7,446,190, 9,181,527, 9,272,002, and 9,266,960, U.S. Patent Publication Nos. 2016/0362472, 2016/0200824, and 2016/0311917, and International (PCT) Publication Nos. WO2013/142034, WO2015/120180, WO2015/188141, WO2016/120220, and WO2017/040945. Exemplary approaches to express CARs using CRISPR systems are described in Hale et al. (2017) MOL THER METHODS CLIN DEV., 4:192. Macleod et al. (2017) MOL THER, 25:949, and Eyquem et al. (2017) NATURE. 543:113.

[0376] In certain embodiments, an immune cell, e.g., a T cell, binds an antigen, e.g., a cancer antigen, through an endogenous T cell receptor (TCR). In certain embodiments, an immune cell, e.g., a T cell, is engineered to express an exogenous TCR, e.g., an exogenous naturally occurring TCR or an exogenous engineered TCR. T cell receptors comprise two chains referred to as the α- and β-chains, that combine on the surface of a T cell to form a heterodimeric receptor that can recognize MHC-restricted antigens. Each of α- and β-chain comprises a constant region and a variable region. Each variable region of the α- and β-chains defines three loops, referred to as complementary determining regions (CDRs) known as CDR1, CDR2, and CDR3 that confer the T cell receptor with antigen binding activity and binding specificity.

[0377] In certain embodiments, a CAR or TCR binds a cancer antigen selected from B-cell maturation antigen (BCMA), mesothelin, prostate specific membrane antigen (PSMA), prostate stem cell antigen (PCSA), carbonic anhydrase IX (CAIX), carcinoembryonic antigen (CEA). CD5, CD7, CD10, CD19, CD20, CD22, CD30, CD33, CD34, CD38, CD41, CD44, CD49f, CD56, CD70, CD74, CD123, CD133, CD138, epithelial glycoprotein2 (EGP 2), epithelial glycoprotein-40 (EGP-40), epithelial cell adhesion molecule (EpCAM), receptor-type tyrosine-protein kinase (FLT3), folate-binding protein (FBP), fetal acetylcholine receptor (AChR), folate receptor-α and β (FRα and β), Ganglioside G2 (GD2), Ganglioside G3 (GD3), epidermal growth factor receptor 2 (HER-2/ERB2), epidermal growth factor receptor vIII (EGFRvIII), ERB3. ERB4, human telom erase reverse transcriptase (hTERT). Interleukin-13 receptor subunit alpha-2 (IL-13Ra2), K-light chain, kinase insert domain receptor (KDR), Lewis A (CA19.9), Lewis Y (LeY), LI cell adhesion molecule (LICAM), melanoma-associated antigen 1 (melanoma antigen family Al, MAGE-A1), Mucin 16 (MUC-16), Mucin 1 (MUC-1; e.g., a truncated MUC-1), KG2D ligands, cancer-testis antigen NY-ESO-1, oncofetal antigen (h5T4), tumor-associated glycoprotein 72 (TAG-72), vascular endothelial growth factor R2 (VEGF-R2), Wilms tumor protein (WT-1), type 1 tyrosine-protein kinase transmembrane receptor (ROR1), B7-H3 (CD276), B7-H6 (Nkp30), Chondroitin sulfate proteoglycan-4 (CSPG4), DNAX Accessory Molecule (DNAM-1), Ephrin type A Receptor 2 (EpHA2), Fibroblast Associated Protein (FAP), Gp100/HLA-A2, Glypican 3 (GPC3), HA-IH, HERK-V, IL-1 IRa, Latent Membrane Protein 1 (LMP1), Neural cell-adhesion molecule (N-CAM/CD56), and Trail Receptor (TRAIL-R).

[0378] Genetic loci suitable for insertion of a CAR- or exogenous TCR-encoding sequence include but are not limited to safe harbor loci (e.g., the AAVS1 locus), TCR subunit loci (e.g., the TCRα constant (TRAC) locus), and other loci associated with certain advantages (e.g., the CCR5 locus, the inactivation of which may prevent or reduce HIV infection). It is understood that insertion in the TRAC locus reduces tonic CAR signaling and enhances T cell potency (see, Eyquem et al. (2017) NATURE, 543:113). Furthermore, inactivation of the endogenous TRAC gene may reduce a graft-versus-host disease (GVHD) response, thereby allowing use of allogeneic T cells as starting materials for preparation of CAR-T cells. Accordingly, in certain embodiments, an immune cell, e.g., a T cell, is engineered to have reduced expression of an endogenous TCR or TCR subunit, e.g., TCRα subunit constant (TRAC). The cell may be engineered to have partially reduced or no expression of the endogenous TCR or TCR subunit. For example, in certain embodiments, the immune cell, e.g., a T cell, is engineered to have less than 80% (e.g., less than 70%, less than 60%, less than 50%, less than 40%, less than 30%, less than 20%, less than 10%, or less than 5%) of the expression of the endogenous TCR or TCR subunit relative to a corresponding unmodified or parental cell. In certain embodiments, the immune cell, e.g., a T cell, is engineered to have no detectable expression of the endogenous TCR or TCR subunit. Exemplary approaches to reduce expression of TCRs using CRISPR systems are described in U.S. Pat. No. 9,181,527, Liu et al. (2017) CELL RES, 27:154, Ren et al. (2017) CLIN CANCER RES, 23:2255, Cooper et al. (2018) LEUKEMIA, 32:1970, and Ren et al. (2017) ONCOTARGET, 8:17002.

[0379] It is understood that certain immune cells, such as T cells, also express major histocompatibility complex (MHC) or human leukocyte antigen (HLA) genes, and inactivation of these endogenous gene may reduce a GVHD response, thereby allowing use of allogeneic T cells as starting materials for preparation of CAR-T cells. Accordingly, in certain embodiments, an immune cell, e.g., a T-cell, is engineered to have reduced expression of one or more endogenous class I or class II MHCs or HLAs (e.g., beta 2-microglobulin (B2M), class II major histocompatibility complex transactivator (CIITA), HLA-E, and/or HLA-G). The cell may be engineered to have partially reduced or no expression of an endogenous MHC or HLA. For example, in certain embodiments, the immune cell, e.g., a T-cell, is engineered to have less than less than 80% (e.g., less than 70%, less than 60%, less than 50%, less than 40%, less than 30%, less than 20%, less than 10%, or less than 5%) of the expression of endogenous MHC (e.g., B2M, CIITA, HLA-E, or HLA-G) relative to a corresponding unmodified or parental cell. In certain embodiments, the immune cell, e.g., a T cell, is engineered to have no detectable expression of an endogenous MHC (e.g., B2M, CIITA, HLA-E, or HLA-G). Exemplary approaches to reduce expression of MHCs using CRISPR systems are described in Liu et al. (2017) CELL RES, 27:154, Ren et al. (2017) CLIN CANCER RES, 23:2255, and Ren et al. (2017) ONCOTARGET, 8:17002.

[0380] Other genes that may be inactivated to reduce a GVHD response include but are not limited to CD3, CD52, and deoxycytidine kinase (DCK). For example, inactivation of DCK may render the immune cells (e.g., T cells) resistant to purine nucleotide analogue (PNA) compounds, which are often used to compromise the host immune system in order to reduce a GVHD response during an immune cell therapy. In certain embodiments, the immune cell, e.g., a T-cell, is engineered to have less than less than 80% (e.g., less than 70%, less than 60%, less than 50%, less than 40%, less than 30%, less than 20%, less than 10%, or less than 5%) of the expression of endogenous CD52 or DCK relative to a corresponding unmodified or parental cell.

[0381] In certain embodiments, an immune cell, e.g., a T cell, is engineered to have reduced expression of an endogenous gene. For example, in certain embodiments, an engineered CRISPR system disclosed herein may be used to engineer an immune cell to have reduced expression of an endogenous gene. For example, in certain embodiments, an engineered CRISPR system disclosed herein may result in DNA cleavage at a gene locus, thereby inactivating the targeted gene. In other embodiments, an engineered CRISPR system disclosed herein may be fused to an effector domain (e.g., a transcriptional repressor or histone methylase) to reduce the expression of the target gene.

[0382] It is understood that the activity of an immune cell (e.g., T cell) may be enhanced by inactivating or reducing the expression of an immune suppressor such as an immune checkpoint protein. Accordingly, in certain embodiments, an immune cell, e.g., a T cell, is engineered to have reduced expression of an immune checkpoint protein. Exemplary immune checkpoint proteins expressed by wild-type T cells include but are not limited to PDCD1 (PD-1), CTLA4, ADORA2A (A2AR), B7-H3, B7-H4, BTLA, KIR, LAG3, HAVCR2 (TIM3), TIGIT, VISTA, PTPN6 (SHP-1), and FAS. The cell may be modified to have partially reduced or no expression of the immune checkpoint protein. For example, in certain embodiments, the immune cell, e.g., a T cell, is engineered to have less than 80% (e.g., less than 70%, less than 60%, less than 50%, less than 40%, less than 30%, less than 20%, less than 10%, or less than 5%) of the expression of the immune checkpoint protein relative to a corresponding unmodified or parental cell. In certain embodiments, the immune cell, e.g., a T cell, is engineered to have no detectable expression of the immune checkpoint protein. Exemplary approaches to reduce expression of immune checkpoint proteins using CRISPR systems are described in International (PCT) Publication No. WO2017/017184, Cooper et al. (2018) LEUKEMIA, 32:1970, Su et al. (2016) ONCOIMMUNOLOGY, 6: e1249558, and Zhang et al. (2017) FRONT MED, 11:554.

[0383] The immune cell can also be engineered to express an exogenous protein (besides an antigen-binding protein described above) at the locus of a human ADORA2A, ALPNR, B2M, BBS1, CALR, CARD11, CD3E, CD3G, CD38, CD40LG, CD52, CD58, CD247, CIITA, COL17A1, CSF1R, CSF2, CTLA4, DCK, DEFB134, DHODH, ERAP1, ERAP2, FAS, mir-101-2, HAVCR2 (also called TIM3), IFNGR1, IFNGR2, IL7R, JAK1, JAK2, LAG3, LCK, LCK1, MLANA, MVD, PDCD1 (also called PD-1), PLCG1, PLK1, PSMB5, PSMB8, PSMB9, PTCD2, PTPN1, PTPN6, PTPN11, RFX5, RFXAP, RPL23, RXANK, SOX10, SRP54, STAT1, Tap1, TAP2, TAPBP, TGFBR2, TIG1T, TIM3, TRAC, TRBC1, TRBC1+2, TRBC2, TUBB, TWFI, and/or U6 gene.

[0384] In certain embodiments, an immune cell, e.g., a T cell, is modified to express a dominant-negative form of an immune checkpoint protein. In certain embodiments, the dominant-negative form of the checkpoint inhibitor can act as a decoy receptor to bind or otherwise sequester the natural ligand that would otherwise bind and activate the wild-type immune checkpoint protein. Examples of engineered immune cells, for example, T cells containing dominant-negative forms of an immune suppressor are described, for example, in International (PCT) Publication No. WO2017/040945.

[0385] In certain embodiments, an immune cell, e.g., a T cell, is modified to express a gene (e.g., a transcription factor, a cytokine, or an enzyme) that regulates the survival, proliferation, activity, or differentiation (e.g., into a memory cell) of the immune cell. In certain embodiments, the immune cell is modified to express TET2, FOXO1, IL-12, IL-15, IL-18, IL-21, IL-7, GLUT1, GLUT3, HK1, HK2, GAPDH, LDHA, PDK1, PKM2, PFKFB3, PGK1, ENO1, GYS1, and/or ALDOA. In certain embodiments, the modification is an insertion of a nucleotide sequence encoding the protein operably linked to a regulatory element. In certain embodiments, the modification is a substitution of a single nucleotide polymorphism (SNP) site in the endogenous gene. In certain embodiments, an immune cell, e.g., a T cell, is modified to express a variant of a gene, for example, a variant that has greater activity than the respective wild-type gene. In certain embodiments, the immune cell is modified to express a variant of CARD11, CD247, IL7R, LCK, or PLCG1. For example, certain gain-of-function variants of IL7R were disclosed in Zenatti et al., (2011) NAT. GENET. 43 (10): 932-39. The variant can be expressed from the native locus of the respective wild-type gene by delivering an engineered system described herein for targeting the native locus in combination with a donor template that carries the variant or a portion thereof.

[0386] In certain embodiments, an immune cell, e.g., a T cell, is modified to express a protein (e.g., a cytokine or an enzyme) that regulates the microenvironment that the immune cell is designed to migrate to (e.g., a tumor microenvironment). In certain embodiments, the immune cell is modified to express CA9, CA12, a V-ATPase subunit, NHE1, and/or MCT-1.

[0387] In certain embodiments, provided is a method for treatment of a disease, e.g., a cancer, by administering to a subject suffering from the disease an effective amount of T cells modified to express a CAR specific to the disease using the modified guide nucleic acids and CRISPR-Cas systems described herein, e.g., in sections IA, IA1, IB, IC, and IVB. In certain embodiments, the T cells are autologous cells removed from the subject, treated to modify genomic DNA to express CAR, expanded, and administered to the subject: in certain embodiments, the T cells are allogeneic T cells that have been treated to modify genomic DNA to express CAR. In certain embodiments, the disease is a blood cancer, such as leukemia or lymphoma; in certain embodiments the disease is a solid tumor cancer.

### VII. Kits

[0388] It is understood that the guide nucleic acid, the engineered, non-naturally occurring system, the CRISPR expression system, and/or a library disclosed herein can be packaged in a kit suitable for use by a medical provider. Accordingly, in another aspect, the invention provides kits containing any one or more of the elements disclosed in the above systems, libraries, methods, and compositions. In certain embodiments, the kit comprises an engineered, non-naturally occurring system as disclosed herein and instructions for using the kit. The instructions may be specific to the applications and methods described herein. In certain embodiments, one or more of the elements of the system are provided in a solution. In certain embodiments, one or more of the elements of the system are provided in lyophilized form, and the kit further comprises a diluent. Elements may be provided individually or in combinations, and may be provided in any suitable container, such as a vial, a bottle, a tube, or immobilized on the surface of a solid base (e.g., chip or microarray). In certain embodiments, the kit comprises one or more of the nucleic acids and/or proteins described herein. In certain embodiments, the kit provides all elements of the systems of the invention.

[0389] In certain embodiments of a kit comprising the engineered, non-naturally occurring dual guide system, the targeter nucleic acid and the modulator nucleic acid are provided in separate containers. In other embodiments, the targeter nucleic acid and the modulator nucleic acid are pre-complexed, and the complex is provided in a single container.

[0390] In certain embodiments, the kit comprises a Cas protein or a nucleic acid comprising a regulatory element operably linked to a nucleic acid encoding a Cas protein provided in a separate container. In other embodiments, the kit comprises a Cas protein pre-complexed with the single guide nucleic acid or a combination of the targeter nucleic acid and the modulator nucleic acid, and the complex is provided in a single container.

[0391] In certain embodiments, the kit further comprises one or more donor templates provided in one or more separate containers. In certain embodiments, the kit comprises a plurality of donor templates as disclosed herein (e.g., in separate tubes or immobilized on the surface of a solid base such as a chip or a microarray), one or more guide nucleic acids disclosed herein, and optionally a Cas protein or a regulatory element operably linked to a nucleic acid encoding a Cas protein as disclosed herein. Such kits are useful for identifying a donor template that introduces optimal genetic modification in a multiplex assay. The CRISPR expression systems as disclosed herein are also suitable for use in a kit.

[0392] In certain embodiments, a kit further comprises one or more reagents and/or buffers for use in a process utilizing one or more of the elements described herein. Reagents may be provided in any suitable container and may be provided in a form that is usable in a particular assay, or in a form that requires addition of one or more other components before use (e.g., in concentrate or lyophilized form). A buffer may be a reaction or storage buffer, including but not limited to a sodium carbonate buffer, a sodium bicarbonate buffer, a borate buffer, a Tris buffer, a MOPS buffer, a HEPES buffer, and combinations thereof. In some embodiments, the buffer is alkaline. In certain embodiments, the buffer has a pH from about 7 to about 10. In certain embodiments, the kit further comprises a pharmaceutically acceptable carrier. In certain embodiments, the kit further comprises one or more devices or other materials for administration to a subject.

### VIII. Embodiments

[0393] In embodiment 1 provided herein is a composition comprising a plurality of ssODNs wherein each of the ssODNs comprises a sequence that is complementary to and specific for a sequence flanking a strand break at an off-target site for a nucleic acid-guided nuclease complex comprising a nucleic acid-guided nuclease and a guide nucleic acid (gNA) wherein the ssODNs each comprise different sequences for different off-target sites. In embodiment 2 provided herein is the composition of claim 1 further comprising the nucleic acid-guided nuclease and gNA. In embodiment 3 provided herein is the composition of embodiment 1 or embodiment 2 wherein each ssODN further comprises a sequence coding for a wild-type gene at the off-target site. In embodiment 4 provided herein is the composition of any previous embodiment wherein at least 10, 20, 30, 40, 50, 60, 70, 80, 90, 95, 99, or 100% of the ssODNs comprise at least one mutation compared to the wild-type sequence. In embodiment 5 provided herein is the composition of embodiment 4 wherein the mutation comprises a mutation to a PAM. In embodiment 6 provided herein is the composition of embodiment 5 wherein the mutation to the PAM decreases or eliminates recognition of the off-target site by the nucleic acid-guided nuclease complex. In embodiment 7 provided herein is the composition of any previous embodiment further comprising a HDR enhancer. In embodiment 8 provided herein is the composition of embodiment 7 wherein the HDR enhancer comprises M3814. In embodiment 9 provided herein is the composition of embodiment 8 wherein the M3814 is present at a concentration of at least 0.1, 0.25, 0.5, 0.75, 1, 1.25, 1.5, 1.75, 2, 2.5, 3, or 4 and/or not more than 0.25, 0.5, 0.75, 1, 1.25, 1.5, 1.75, 2, 2.5, 3, 4, or 5 μM, for example 0.1-5 μM. In embodiment 10 provided herein is the composition of any previous embodiment further comprising an anionic polymer. In embodiment 11 provided herein is the composition of embodiment 10 wherein the anionic polymer comprises a non-specific ssODN or a peptide. In embodiment 12 provided herein is the composition of embodiment 11 wherein the peptide comprises poly-L-glutamic acid (PGA). In embodiment 13 provided herein is the composition of embodiment 11 comprising at least 50, 60, 70, 80, 90, 100, 150, 200, 250, 300, 350, 400, 450, 500, 550, 600, 700, 800, or 900 and/or not more than 60, 70, 80, 90, 100, 150, 200, 250, 300, 350, 400, 450, 500, 550, 600, 700, 800, 900 or 1000 pmol non-specific ssODN, for example 50-1000 pmol non-specific ssODN. In embodiment 14 provided herein is the composition of embodiment 12 wherein the PGA is present at a concentration of at least 0.01, 0.05, 0.1, 0.15, 0.2, 0.25, 0.3, 0.35, 0.4, 0.45, 0.5, 0.55, 0.6, 0.65, 0.7, 0.75, 0.8, 0.85, 0.9, 0.95, 1, 1.5, 2, 2.5, 3, 3.5, 4, or 4.5 and/or not more than 0.05, 0.1, 0.15, 0.2, 0.25, 0.3, 0.35, 0.4, 0.45, 0.5, 0.55, 0.6, 0.65, 0.7, 0.75, 0.8, 0.85, 0.9, 0.95, 1, 1.5, 2, 2.5, 3, 3.5, 4, 4.5, or 5 μg μL⁻¹ per pmol nucleic acid-guided nuclease complex, for example 0.01-5 μg μL⁻¹ per pmol nucleic acid-guided complex. In embodiment 15 provided herein is the composition of any previous embodiment wherein the ssODN or ssODNs that are complementary to and specific for a sequence flanking a strand break have a length of at least 100, 120, 140, 160, 180, 200, 220, 240, 260, 280, 300, 350, 400, 450, 500, or 1000 and/or not more than 120, 140, 160, 180, 200, 220, 240, 260, 280, 300, 350, 400, 450, 500, 1000, or 2000 nucleotides, for example 100-500 nucleotides. In embodiment 16 provided herein is the composition of any previous embodiment wherein the nucleic acid-guided nuclease is a Class 1 nuclease. In embodiment 17 provided herein is the composition of any one of embodiments 1 through 15 wherein the nucleic acid-guided nuclease is a Class 2 nuclease. In embodiment 18 provided herein is the composition of embodiment 17 wherein the nucleic acid-guided nuclease is a Type II or a Type V nuclease. In embodiment 19 provided herein is the composition of embodiment 18 wherein the nucleic acid-guided nuclease is a Type V-A, V-B, V-C, V-D, or V-E nuclease. In embodiment 20 provided herein is the composition of embodiment 19 wherein the nucleic acid-guided nuclease is a Type V-A nuclease. In embodiment 21 provided herein is the composition of embodiment 20 wherein the nucleic acid-guided nuclease is a MAD nuclease, an ART nuclease, or an ABW nuclease. In embodiment 22 provided herein is the composition of embodiment 21 wherein the nucleic acid-guided nuclease is a MAD1, MAD2, MAD3, MAD4, MAD5, MAD6, MAD7, MAD8, MAD9, MAD10, MAD1I, MAD12, MAD13, MAD14, MAD15, MAD16, MAD17, MAD18, MAD19, or MAD20 nuclease. In embodiment 23 provided herein is the composition of embodiment 21 wherein the nucleic acid-guided nuclease is an ART1, ART2, ART3, ART4, ART5, ART6, ART7, ART8, ART9, ART10, ART11, ART11*, ART12, ART13, ART14, ART15, ART16, ART17, ART18, ART19, ART20, ART21, ART22, ART23, ART24, ART25, ART26, ART27, ART28, ART29, ART30, ART31, ART32, ART33, ART34, or ART35 nuclease. In embodiment 24 provided herein is the composition of any one of embodiments 20 through 23 wherein the nucleic acid-guided nuclease has an amino acid sequence at least 80, 85, 90, 95, 97, 98, 99, or 100% identical to the amino acid sequence of MAD2, MAD7, ART2, ART11, or ART11*. In embodiment 25 provided herein is the composition of embodiment 19 wherein the nucleic acid-guided nuclease has an amino acid sequence that is at least 80, 85, 90, 95, 99, or 100% identical to the amino acid sequence of SEQ ID NO: 37. In embodiment 26 provided herein is the composition of any previous embodiment wherein the nucleic acid-guided nuclease comprises at least one nuclear localization signal (NLS), at least one purification tag, or at least one cleavage site. In embodiment 27 provided herein is the composition of embodiment 26 wherein the nucleic acid-guided nuclease comprises at least 4 NLS. In embodiment 28 provided herein is the composition of embodiment 27 wherein the nucleic acid-guided nuclease comprises one N-terminal and three C-terminal NLS. In embodiment 29 provided herein is the composition of embodiment 27 wherein the nucleic acid-guided nuclease comprises at least five NLS. In embodiment 30 provided herein is the composition of embodiment 29 wherein the nucleic acid-guided nuclease comprises five N-terminal NLS. In embodiment 31 provided herein is the composition of any one of embodiments 26 through 30 wherein the NLSs comprise any of SEQ ID NOs: 40-56. In embodiment 32 provided herein is the composition of embodiment 31 wherein the NLSs comprise any of SEQ ID NOs: 40. 51, and 56. In embodiment 33 provided herein is the composition of any previous embodiment wherein the gNA comprises (A) a targeter nucleic acid comprising a targeter stem sequence and a spacer sequence; and (B) a modulator nucleic acid comprising a modulator stem sequence complementary to the targeter stem sequence, and. optionally, a 5′ sequence. In embodiment 34 provided herein is the composition of any previous embodiment wherein the gNA is an engineered, non-naturally occurring guide nucleic acid. In embodiment 35 provided herein is the composition of any previous embodiment wherein the gNA comprises a single polynucleotide. In embodiment 36 provided herein is the composition of any one of embodiments 1 through 34 wherein the gNA comprises a dual guide nucleic acid, wherein the targeter nucleic acid and the modulator nucleic acid are separate polynucleotides. In embodiment 37 provided herein is the composition of embodiment 36 wherein the dual gNA is capable of binding to and activating a nucleic acid-guided nuclease, that, in a naturally occurring system, is activated by a single crRNA in the absence of a tracrRNA. In embodiment 38 provided herein is the composition of any previous embodiment wherein the gNA comprises a spacer sequence of any one of SEQ ID NOs: 86-384 and 983-1798. In embodiment 39 provided herein is the composition of any previous embodiment wherein some or all of the gNA is RNA. In embodiment 40 provided herein is the composition of embodiment 39 wherein at least 50%, at least 70%, at least 90%, at least 95%, or 100% of the gNA comprises RNA. In embodiment 41 provided herein is the composition of any previous embodiment wherein the gNA comprises one or more chemical modifications. In embodiment 42 provided herein is the composition of embodiment 41 wherein the chemical modification comprises a 2′-O-alkyl, a 2′-O-methyl, a phosphorothioate, a phosphonoacetate, a thiophosphonoacetate, a 2′-O-methyl-3′-phosphorothioate, a 2′-O-methyl-3′-phosphonoacetate, a 2′-O-methyl-3′-thiophosphonoacetate, a 2′-deoxy-3′-phosphonoacetate, a 2′-deoxy-3′-thiophosphonoacetate, or a combination thereof.

[0394] In embodiment 43 provided herein is a kit comprising the composition of any previous embodiment.

[0395] In embodiment 44 provided herein is a cell comprising the composition of any one of embodiments 1 through 42. In embodiment 45 provided herein is the cell of embodiment 44 wherein the cell is a human cell. In embodiment 46 provided herein is the cell of embodiment 45 wherein the human cell comprises an immune cell or a stem cell. In embodiment 47 provided herein is the cell of embodiment 46 wherein the immune cell is a neutrophil, eosinophil, basophil, mast cell, monocyte, macrophage, dendritic cell, natural killer cell, or a lymphocyte. In embodiment 48 provided herein is the cell of embodiment 47 wherein the immune cell is a T cell. In embodiment 49 provided herein is the cell of embodiment 48 wherein the immune cell is a CAR-T cell. In embodiment 50 provided herein is the cell of embodiment 46 wherein the stem cell is a human pluripotent, multipotent stem cell, embryonic stem cell, induced pluripotent stem cell, or hematopoietic stem cell. In embodiment 51 provided herein is the cell of embodiment 50 wherein the stem cell is a CD34+ stem cell or an induced pluripotent stem cell (iPSC).

[0396] In embodiment 52 provided herein is a method of cleaving at or near a target nucleic acid sequence which is at or near an on-target site within a target polynucleotide comprising contacting the target polynucleotide with the composition of any one of embodiments 2 through 42, wherein the nucleic acid-guided nuclease complex cleaves at least one strand of the target polynucleotide within the on-target site.

[0397] In embodiment 53 provided herein is a method of editing a genome of a eukaryotic cell comprising delivering the composition of any one of embodiments 2 through 42 into the eukaryotic cell, thereby resulting in editing of the genome of the eukaryotic cell. In embodiment 54 provided herein is the method of embodiment 53, wherein the composition is delivered by electroporation.

[0398] In embodiment 55 provided herein is a method of treating a disease or a disorder comprising administering to a subject in need thereof an effective amount of the composition of any one of embodiments 2 through 42, or an effective amount of cells modified by treatment with a composition of any one of embodiments 2 through 42.

[0399] In embodiment 56 provided herein is a method of reducing the proportion of mutations in off-target sites in a genome of a cell comprising contacting the cell with the composition any one of embodiments 2 through 42, compared to the proportion if the composition is not used. In embodiment 57 provided herein is the method of embodiment 56 also comprising increasing homology-directed repair (HDR). In embodiment 58 provided herein is the method of embodiment 56 also comprising increasing viability and/or expansion capacity of cells after editing.

[0400] In embodiment 59 provided herein is a method of both increasing HDR at an on-target site in a genome of a cell and decreasing mutations at one or more off-target sites in the genome of the cell comprising contacting the cell with a composition of any one of embodiments 2 through 42, thereby both increasing HDR at the on-target site and decreasing the proportion of mutations in off-target sites of the genome of the cell compared to the proportion if the composition is not used.

[0401] In embodiment 60 provided herein is a composition comprising (A) a nucleic acid-guided nuclease complex comprising a Type V nuclease and a compatible gNA wherein the nucleic acid-guided nuclease complex specifically binds to a target nucleic acid sequence at or near an on-target site and cleaves at or near the target nucleic acid sequence to create a strand break in the on-target site; and (B) a first ssODN. In embodiment 61 provided herein is the composition of embodiment 60 wherein the first ssODN comprises a sequence that is complementary to a sequence flanking the strand break in the on-target site on the 3′ side of the strand break. In embodiment 62 provided herein is the composition of embodiment 60 wherein the first ssODN comprises a sequence that is complementary to a sequence flanking the strand break in the on-target site on the 5′ side of the strand break. In embodiment 63 provided herein is the composition of embodiment 61 further comprising a second ssODN comprising a sequence that is complementary to a sequence flanking the strand break in the on-target site on the 5′ side of the strand break. In embodiment 64 provided herein is the composition of embodiment 62 further comprising a second ssODN comprising a sequence that is complementary to a sequence flanking the strand break in the on-target site on the 3′ side of the strand break. In embodiment 65 provided herein is the composition of embodiment 63 or embodiment 64 wherein the first and second ssODNs are the same. In embodiment 66 provided herein is the composition of embodiment 63 or embodiment 64 wherein the first and second ssODNs are different. In embodiment 67 provided herein is the composition of any one of embodiments 60 through 66 wherein at least a portion of the first and/or second ssODNs are capable of being integrated at or near the strand break. In embodiment 68 provided herein is the composition of any one of embodiments 60 through 67 further comprising a donor template separate from ssODNs. In embodiment 69 provided herein is the composition of any one of embodiments 60 through 68 wherein the nucleic acid-guided nuclease complex also binds to one or more off-target nucleic acid sequences at or near one or more off-target sites and cleaves at or near the one or more off-target nucleic acid sequences to create a strand break in the one or more off-target sites. In embodiment 70 provided herein is the composition of embodiment 69 further comprising one or more ssODNs that are complementary to a sequence flanking the strand break in the one or more off-target sites. In embodiment 71 provided herein is the composition of embodiment 70 comprising a plurality of ssODNs each of which comprises a different sequence complementary to sequences flanking the strand break in the different off-target sites. In embodiment 72 provided herein is the composition of embodiment 71 comprising at least 1, 2, 3, 4, 5, 6, 7, 8, 9, 10, 20, 30, 40, 50, 60, 70, 80, 90, 100, 200, 300, 400, 500, 700, or 1000 and/or no more than 2, 3, 4, 5, 6, 7, 8, 9, 10, 20, 30, 40, 50, 60, 70, 80, 90, 100, 200, 300, 400, 500, 700, 1000 or 2000 ssODNs each of which comprises a different sequence complementary to sequences flanking the strand break in the different off-target sites. In embodiment 73 provided herein is the composition of any one of embodiments 70 through 72 wherein one or more of the ssODNs comprising sequences complementary to a sequence flanking the double stranded break at the one or more off-target sites comprise a mutation in the PAM. In embodiment 74 provided herein is the composition of any one of embodiments 60 through 73 wherein the nucleic acid-guided nuclease is a Class 1 nuclease. In embodiment 75 provided herein is the composition of any one of embodiments 60 through 73 wherein the nucleic acid-guided nuclease is a Class 2 nuclease. In embodiment 76 provided herein is the composition of embodiment 75 wherein the nucleic acid-guided nuclease is a Type II or a Type V nuclease. In embodiment 77 provided herein is the composition of embodiment 76 wherein the nucleic acid-guided nuclease is a Type V-A, V-B, V-C, V-D, or V-E nuclease. In embodiment 78 provided herein is the composition of embodiment 77 wherein the nuclease is a Type V-A nuclease. In embodiment 79 provided herein is the composition of embodiment 77 wherein the nucleic acid-guided nuclease is a MAD nuclease, an ART nuclease, or an ABW nuclease. In embodiment 80 provided herein is the composition of embodiment 77 wherein the nucleic acid-guided nuclease is a MAD1, MAD2, MAD3, MAD4, MAD5, MAD6, MAD7, MAD8, MAD9, MAD10, MAD1I, MAD12, MAD13, MAD14, MAD15, MAD16, MAD17, MAD18, MAD19, or MAD20 nuclease. In embodiment 81 provided herein is the composition of embodiment 77 wherein the nucleic acid-guided nuclease is an ART1, ART2, ART3, ART4, ART5, ART6, ART7, ART8, ART9, ART10, ART11, ART11*, ART12, ART13, ART14, ART15, ART16, ART17, ART18, ART19, ART20, ART21, ART22, ART23, ART24, ART25, ART26, ART27, ART28, ART29, ART30, ART31, ART32, ART33, ART34, or ART35 nuclease. In embodiment 82 provided herein is the composition of embodiment 77 wherein the nucleic acid-guided nuclease has an amino acid sequence at least 80, 85, 90, 95, 99, or 100% % identical to the amino acid sequence of MAD2, MAD7, ART2, ART11, or ART11*. In embodiment 83 provided herein is the composition of embodiment 77, wherein the nucleic acid-guided nuclease comprises an amino acid sequence that is at least 80, 85, 90, 95, 99, or 100% identical to the amino acid sequence of SEQ ID NO: 37. In embodiment 84 provided herein is the composition of any one of embodiments 60 through 83 wherein the nucleic acid-guided nuclease comprises at least one nuclear localization signal (NLS), at least one purification tag, or at least one cleavage site. In embodiment 85 provided herein is the composition of embodiment 84 wherein the nucleic acid-guided nuclease comprises at least 4 NLSs. In embodiment 86 provided herein is the composition of embodiment 85 wherein the nucleic acid-guided nuclease comprises one N-terminal and three C-terminal NLS. In embodiment 87 provided herein is the composition of embodiment 85 wherein the nucleic acid-guided nuclease comprises at least five NLS. In embodiment 88 provided herein is the composition of embodiment 87 wherein the nucleic acid-guided nuclease comprises five N-terminal NLS. In embodiment 89 provided herein is the composition of any one of embodiments 84 through 88 wherein the NLSs comprise any of SEQ ID NOs: 40-56. In embodiment 90 provided herein is the composition of embodiment 89 wherein the NLSs comprises any of SEQ ID NOs: 40. 51, and 56. In embodiment 91 provided herein is the composition of any one of embodiments 60 through 90 wherein the gNA comprises (A) a targeter nucleic acid comprising a targeter stem sequence and a spacer sequence; and (B) a modulator nucleic acid comprising a modulator stem sequence complementary to the targeter stem sequence, and, optionally, a 5′ sequence. In embodiment 92 provided herein is the composition of any one of embodiments any one of embodiments 60 through 91 wherein the gNA is an engineered, non-naturally occurring guide nucleic acid. In embodiment 93 provided herein is the composition of any one of embodiments any one of embodiments 60 through 92 wherein the gNA comprises a single polynucleotide. In embodiment 94 provided herein is the composition of any one of embodiments any one of embodiments 60 through 92 wherein the gNA comprises a dual guide nucleic acid, wherein the targeter nucleic acid and the modulator nucleic acid are separate polynucleotides. In embodiment 95 provided herein is the composition of embodiment 94 wherein the dual gNA is capable of binding to and activating a nucleic acid-guided nuclease. that, in a naturally occurring system, is activated by a single crRNA in the absence of a tracrRNA. In embodiment 96 provided herein is the composition of any one of embodiments 60 through 95 wherein the gNA comprises a spacer sequence of any one of SEQ ID NOs: 86-384 and 983-1798. In embodiment 97 provided herein is the composition of any one of embodiments 60 through 96 wherein some or all of the gNA is RNA. In embodiment 98 provided herein is the composition of embodiment 97 wherein at least 50%, at least 70%, at least 90%, at least 95%, or 100% of the gNA comprises RNA. In embodiment 99 provided herein is the composition of any one of embodiments 60 through 98 wherein the gNA comprises one or more chemical modifications. In embodiment 100 provided herein is the composition of embodiment 99 wherein the chemical modification comprises a 2′-O-alkyl, a 2′-O-methyl, a phosphorothioate, a phosphonoacetate, a thiophosphonoacetate, a 2′-O-methyl-3′-phosphorothioate, a 2′-O-methyl-3′-phosphonoacetate, a 2′-O-methyl-3′-thiophosphonoacetate, a 2′-deoxy-3′-phosphonoacetate, a 2′-deoxy-3′-thiophosphonoacetate or a combination thereof. In embodiment 101 provided herein is the composition of any one of embodiments 60 through 100 wherein the ssODN is at least 100, 120, 140, 160, 180, 200, 220, 240, 260, 280, 300, 350, 400, 450, 500, or 1000 and/or not more than 120, 140, 160, 180, 200, 220, 240, 260, 280, 300, 350, 400, 450, 500, 1000, or 2000 nucleotides, for example 100-500 nucleotides. In embodiment 102 provided herein is the composition of any one of embodiments 60 through 101 comprising at least 50, 60, 70, 80, 90, 100, 150, 200, 250, 300, 350, 400, 450, 500, 550, 600, 700, 800, or 900 and/or not more than 60, 70, 80, 90, 100, 150, 200, 250, 300, 350, 400, 450, 500, 550, 600, 700, 800, 900 or 1000 pmol of each ssODN, for example 50-1000 pmol of each ssODN. In embodiment 103 provided herein is the composition of any one of embodiments 60 through 102 further comprising a HDR enhancer. In embodiment 104 provided herein is the composition of embodiment 103 wherein the HDR enhancer comprises M3814. In embodiment 105 provided herein is the composition of embodiment 104 wherein the M3814 concentration is at least 0.1, 0.25, 0.5, 0.75, 1, 1.25, 1.5, 1.75, 2, 2.5, 3, or 4 and/or not more than 0.25, 0.5, 0.75, 1, 1.25, 1.5, 1.75, 2, 2.5, 3, 4, or 5 μM, for example 0.1-5 μM. In embodiment 106 provided herein is the composition of any one of embodiments 60 through 105 further comprising an anionic polymer. In embodiment 107 provided herein is the composition of embodiment 106 wherein the anionic polymer comprises a non-specific ssODN or a peptide, or poly-L-glutamic acid (PGA). In embodiment 108 provided herein is the composition of embodiment 107 wherein the peptide comprises poly-L-glutamic acid (PGA). In embodiment 109 provided herein is the composition of embodiment 107 comprising at least 50, 60, 70, 80, 90, 100, 150, 200, 250, 300, 350, 400, 450, 500, 550, 600, 700, 800, or 900 and/or not more than 60, 70, 80, 90, 100, 150, 200, 250, 300, 350, 400, 450, 500, 550, 600, 700, 800, 900 or 1000 pmol non-specific ssODN. In embodiment 110 provided herein is the composition of embodiment 108 wherein the PGA is present at a concentration of at least 0.01, 0.05. 0.1, 0.15, 0.2, 0.25, 0.3, 0.35, 0.4, 0.45, 0.5, 0.55, 0.6, 0.65, 0.7, 0.75, 0.8, 0.85, 0.9. 0.95, 1, 1.5, 2, 2.5, 3, 3.5, 4, or 4.5 and/or not more than 0.05, 0.1, 0.15, 0.2, 0.25, 0.3, 0.35, 0.4, 0.45, 0.5, 0.55, 0.6, 0.65, 0.7, 0.75, 0.8, 0.85, 0.9, 0.95, 1, 1.5, 2, 2.5, 3, 3.5, 4, 4.5, or 5 μg μL⁻¹ per pmol RNP complex, for example 0.01-5 μg μL⁻¹ per pmol RNP complex.

[0402] In embodiment 111 provided herein is a cell comprising the composition of any one of embodiments 60 through 110. In embodiment 112 provided herein is the cell of embodiment 111, wherein the cell is a human cell. In embodiment 113 provided herein is the cell of embodiment 112 wherein the human cell is an immune cell or a stem cell. In embodiment 114 provided herein is the cell of embodiment 113 wherein the immune cell is a neutrophil, cosinophil, basophil, mast cell, monocyte, macrophage, dendritic cell, natural killer cell, or a lymphocyte. In embodiment 115 provided herein is the cell of embodiment 114 wherein the immune cell is a T cell. In embodiment 116 provided herein is the cell of embodiment 115 wherein the immune cell is a CAR-T cell. In embodiment 117 provided herein is the cell of embodiment 113 wherein the stem cell is a human pluripotent, multipotent stem cell, embryonic stem cell, induced pluripotent stem cell, or hematopoietic stem cell. In embodiment 118 provided herein is the cell of embodiment 117 wherein the stem cell is a CD34+ stem cell or an iPSC.

[0403] In embodiment 119 provided herein is a composition comprising (A) a first ssODN; and (B) a HDR enhancer. In embodiment 120 provided herein is the composition of embodiment 119, wherein the first ssODN comprises a sequence complementary to a sequence flanking a double stranded break at an on-target site. In embodiment 121 provided herein is the composition of embodiment 119 or embodiment 120, further comprising (C) nucleic acid-guided nuclease complex comprising a Type V nucleic acid-guided nuclease and a compatible gNA, wherein the nucleic acid-guided nuclease complex specifically binds to a target nucleic acid sequence at or near an on-target site and cleaves at or near the target nucleic acid sequence to create a double-stranded break in the on-target site. In embodiment 122 provided herein is the composition of embodiment 121 wherein the nucleic acid-guided nuclease complex also binds to one or more off-target nucleic acid sequences at one or more off-target sites and cleaves at or near the one or more off-target nucleic acid sequences to create on or more double-strand breaks at the one or more off-target sites. In embodiment 123 provided herein is the composition of embodiment 122 further comprising a ssODN comprising a sequence complementary to a sequence flanking a double stranded break at an off-target site In embodiment 124 provided herein is the composition of embodiment 123 comprising a plurality of ssODNs each of which comprises a different sequence complementary to a sequence flanking a double stranded break at different off-target sites. In embodiment 125 provided herein is the composition of embodiment 124 comprising at least 1, 2, 3, 4, 5, 6, 7, 8, 9, 10, 20, 30, 40, 50, 60, 70, 80, 90, 100, 200, 300, 400, 500, 700, or 1000 and/or no more than 2, 3, 4, 5, 6, 7, 8, 9, 10, 20, 30, 40, 50, 60, 70, 80, 90, 100, 200, 300, 400, 500, 700, 1000 or 2000 ssODNs each of which comprises a different sequence complementary to a sequence flanking a double stranded break at different off-target sites. In embodiment 126 provided herein is the composition of any one of embodiments 123 through 125 wherein one or more of the ssODNs complementary to a sequence flanking the double stranded break at the one or more off-target sites comprise a mutation in the PAM. In embodiment 127 provided herein is the composition of any one of embodiments 121 through 126 wherein the nucleic acid-guided nuclease is a Class 1 nuclease. In embodiment 128 provided herein is the composition any one of embodiments 121 through 126 wherein the nucleic acid-guided nuclease is a Class 2 nuclease. In embodiment 129 provided herein is the composition of embodiment 128 wherein the nucleic acid-guided nuclease is a Type II or a Type V nuclease. In embodiment 130 provided herein is the composition of embodiment 129 wherein the nucleic acid-guided nuclease is a Type V-A, V-B, V-C, V-D, or V-E nuclease. In embodiment 131 provided herein is the composition of embodiment 130 wherein the nuclease is a Type V-A nuclease. In embodiment 132 provided herein is the composition of embodiment 131 wherein the nucleic acid-guided nuclease is a MAD nuclease, an ART nuclease, or an ABW nuclease. In embodiment 133 provided herein is the composition of embodiment 132 wherein the nucleic acid-guided nuclease comprises a MAD1, MAD2, MAD3, MAD4, MAD5, MAD6, MAD7, MAD8, MAD9, MAD10, MAD11, MAD12, MAD13, MAD14, MAD15, MAD16, MAD17, MAD18, MAD19, or MAD20 nuclease. In embodiment 134 provided herein is the composition of embodiment 132 wherein the nucleic acid-guided nuclease is an ART1, ART2, ART3, ART4, ART5, ART6, ART7, ART8, ART9, ART10, ART11, ART11*, ART12, ART13, ART14, ART15, ART16, ART17, ART18, ART19, ART20, ART21, ART22, ART23, ART24, ART25, ART26, ART27, ART28, ART29, ART30, ART31, ART32, ART33, ART34, or ART35 nuclease. In embodiment 135 provided herein is the composition of embodiment 132 wherein the nucleic acid-guided nuclease comprises an amino acid sequence at least 80% identical to the amino acid sequence of MAD2, MAD7, ART2, ART11, or ART11*. In embodiment 136 provided herein is the composition of embodiment 132 wherein the nucleic acid-guided nuclease comprises an amino acid sequence that is at least 80, 85, 90, 95, 99, or 100% identical to the amino acid sequence of SEQ ID NO: 37. In embodiment 137 provided herein is the composition of any one of embodiments 121 through 136 wherein the nucleic acid-guided nuclease comprises at least one nuclear localization signal (NLS), at least one purification tag, or at least one cleavage site. In embodiment 138 provided herein is the composition of embodiment 137 wherein the nucleic acid-guided nuclease comprises at least 4 NLS. In embodiment 139 provided herein is the composition of embodiment 138 wherein the nucleic acid-guided nuclease comprises one N-terminal and three C-terminal NLS. In embodiment 140 provided herein is the composition of embodiment 138 wherein the nucleic acid-guided nuclease comprises at least five NLS. In embodiment 141 provided herein is the composition of embodiment 140 wherein the nucleic acid-guided nuclease comprises five N-terminal NLS. In embodiment 142 provided herein is the composition of any one of embodiments 137 through 141 wherein the NLSs comprise any of SEQ ID NOs: 40-56. In embodiment 143 provided herein is the composition of embodiment 142 wherein the NLSs comprises any of SEQ ID NOs: 40, 51, and 56. In embodiment 144 provided herein is the composition of any one of embodiments 121 through 143 wherein the nucleic acid-guided nuclease complex comprises a guide nucleic acid (gNA). In embodiment 145 provided herein is the composition of embodiment 144 wherein the gNA comprises: (A) a targeter nucleic acid comprising a targeter stem sequence and a spacer sequence; and (B) a modulator nucleic acid comprising a modulator stem sequence complementary to the targeter stem sequence, and, optionally, a 5′ sequence. In embodiment 146 provided herein is the composition of any one of embodiments 144 or embodiment 145 wherein the gNA an engineered, non-naturally occurring guide nucleic acid. In embodiment 147 provided herein is the composition of any one of embodiments 144 through 146 wherein the gNA comprises a single polynucleotide. In embodiment 148 provided herein is the composition of any one of embodiments 144 through 146 wherein the gNA comprises a dual guide nucleic acid, wherein the targeter nucleic acid and the modulator nucleic acid are separate polynucleotides. In embodiment 149 provided herein is the composition of embodiment 148 wherein the dual gNA is capable of binding to and activating a nucleic acid-guided nuclease, that, in a naturally occurring system, is activated by a single crRNA in the absence of a tracrRNA. In embodiment 150 provided herein is the composition of any one of embodiments 144 through 149 wherein the gNA comprises a spacer sequence of any one of SEQ ID NOs: 86-384 and 983-1798. In embodiment 151 provided herein is the composition of any one of embodiments 144 through 150 wherein some or all of the gNA is RNA. In embodiment 152 provided herein is the composition of embodiment 151 wherein at least 50%, at least 70%, at least 90%, at least 95%, or 100% of the gNA comprises RNA. In embodiment 153 provided herein is the composition of any one of embodiments 144 through 152 wherein the gNA comprises one or more chemical modifications. In embodiment 154 provided herein is the composition of embodiment 153 wherein the chemical modification comprises a 2′-O-alkyl, a 2′-O-methyl, a phosphorothioate, a phosphonoacetate, a thiophosphonoacetate, a 2′-O-methyl-3′-phosphorothioate, a 2′-O-methyl-3′-phosphonoacetate, a 2′-O-methyl-3′-thiophosphonoacetate, a 2′-deoxy-3′-phosphonoacetate, a 2′-deoxy-3′-thiophosphonoacetate or a combination thereof. In embodiment 155 provided herein is the composition of any one of embodiments 119 through 154 wherein the ssODN or ssODNS have a length of at least 100, 120, 140, 160, 180, 200, 220, 240, 260, 280, 300, 350, 400, 450, 500, or 1000 and/or not more than 120, 140, 160, 180, 200, 220, 240, 260, 280, 300, 350, 400, 450. 500, 1000, or 2000 nucleotides, for example 100-500 nucleotides. In embodiment 156 provided herein is the composition of any one of embodiments 119 through 155 comprising at least 50, 60, 70, 80, 90, 100, 150, 200, 250, 300, 350, 400, 450, 500, 550, 600, 700, 800, or 900 and/or not more than 60, 70, 80, 90, 100, 150, 200, 250, 300, 350, 400, 450, 500, 550, 600, 700, 800, 900 or 1000 pmol of each ssODN, for example 50-1000 pmol of each ssODN. In embodiment 157 provided herein is the composition of any one of embodiments 119 through 156 wherein the HDR enhancer comprises M3814. In embodiment 158 provided herein is the composition of embodiment 157 wherein the M3814 is present at a concentration of at least 0.1, 0.25, 0.5, 0.75, 1, 1.25, 1.5, 1.75, 2, 2.5, 3, or 4 and/or not more than 0.25, 0.5, 0.75, 1, 1.25, 1.5, 1.75, 2, 2.5, 3, 4, or 5 μM, for example 0.1-5 μM. In embodiment 159 provided herein is the composition of any one of embodiments 119 through 158 further comprising an anionic polymer. In embodiment 160 provided herein is the composition of embodiment 159, wherein the anionic polymer comprises a non-specific ssODN or a peptide. In embodiment 161 provided herein is the composition of embodiment 160 comprising a peptide. In embodiment 162 provided herein is the composition of embodiment 161 wherein the peptide comprises poly-L-glutamic acid (PGA). In embodiment 163 provided herein is the composition of embodiment 160 comprising at least 50, 60, 70, 80, 90, 100, 150, 200, 250, 300, 350, 400, 450, 500, 550, 600, 700, 800, or 900 and/or not more than 60, 70, 80, 90, 100, 150, 200, 250, 300, 350, 400, 450, 500, 550, 600, 700, 800, 900 or 1000 pmol non-specific ssODN. In embodiment 164 provided herein is the composition of embodiment 162 wherein the PGA is present at a concentration of at least 0.01, 0.05, 0.1, 0.15, 0.2, 0.25, 0.3, 0.35, 0.4, 0.45, 0.5, 0.55, 0.6, 0.65, 0.7, 0.75, 0.8, 0.85, 0.9, 0.95, 1, 1.5, 2, 2.5, 3, 3.5, 4, or 4.5 and/or not more than 0.05, 0.1, 0.15, 0.2, 0.25, 0.3, 0.35, 0.4, 0.45, 0.5, 0.55, 0.6, 0.65, 0.7, 0.75, 0.8, 0.85, 0.9, 0.95, 1, 1.5, 2, 2.5, 3, 3.5, 4, 4.5, or 5 μg μL⁻¹ per pmol RNP complex, for example 0.01-5 μg μL⁻¹ per pmol RNP complex.

[0404] In embodiment 165 provided herein is a cell comprising the composition of any one of embodiments 119 through 164. In embodiment 166 provided herein is the cell of embodiment 165 wherein the cell is a human cell. In embodiment 167 provided herein is the cell of embodiment 166 wherein the human cell is an immune cell or a stem cell. In embodiment 168 provided herein is the cell of embodiment 167 wherein the immune cell is a neutrophil, cosinophil, basophil, mast cell, monocyte, macrophage, dendritic cell, natural killer cell, or a lymphocyte. In embodiment 169 provided herein is the cell of embodiment 168 wherein the immune cell is a T cell. In embodiment 170 provided herein is the cell of embodiment 169 wherein the immune cell is a CAR-T cell. In embodiment 171 provided herein is the cell of embodiment 167 wherein the stem cell is a human pluripotent, multipotent stem cell, embryonic stem cell, induced pluripotent stem cell, or hematopoietic stem cell. In embodiment 172 provided herein is the cell of embodiment 171 wherein the stem cell is a CD34+ stem cell or an iPSC.

[0405] In embodiment 173 provided herein is a composition comprising (A) a ssODN comprising a sequence complementary to a nucleic acid sequence flanking a double stranded break at an on-target site for a nucleic acid-guided nuclease complex; and (B) a ssODN comprising a sequence complementary to a nucleic acid sequence flanking a double stranded break at an off-target site (ssODNoff) for the nucleic acid-guided nuclease complex. In embodiment 174 provided herein is the composition of embodiment 173 further comprising, for each integer x representing an off-target site for the nucleic-acid guided nuclease complex, a (ssODNoff)x wherein each (ssODNoff)x comprises a sequence complementary to a nucleic acid sequence flanking a double stranded break at an off-target site (x). In embodiment 175 provided herein is the composition of embodiment 174 wherein the number of different integers x is at least 2, 3, 4, 5, 6, 7, 8, 9, 10, 20, 30, 40, 50, 60, 70, 80, 90, 100, 120, 140, 160, 180, 200, 250, 300, 350, 400, 450, 500, or 1000 and/or no more than 3, 4, 5, 6, 7, 8, 9, 10, 20, 30, 40, 50, 60, 70, 80, 90, 100, 120, 140, 160, 180, 200, 250, 300, 350, 400, 450, 500, 1000, or 2000. In embodiment 176 provided herein is the composition of embodiment 175 where the number of different integers x is 2-2000. In embodiment 177 provided herein is the composition of embodiment 175 wherein the number of different integers x is 2-1000. In embodiment 178 provided herein is the composition of any one of embodiments 173 through 177 wherein the ssODN comprising a sequence complementary to a nucleic acid sequence flanking a double stranded break at an on-target site comprises at least one mutation compared to the wildtype sequence at the on-target site. In embodiment 179 provided herein is the composition of embodiment 178 wherein the mutation comprises a SNP, an INDEL, and/or a missense mutation. In embodiment 180 provided herein is the composition of any one of embodiments 173 through 179 wherein the ssODN or ssODNs comprising a sequence complementary to a nucleic acid sequence flanking a double stranded break at one or more off-target sites comprises the wildtype sequence for the one or more off-target sites. In embodiment 181 provided herein is the composition of any one of embodiments 173 through 180 wherein the ssODN or ssODNS comprising a sequence complementary to a nucleic acid sequence flanking a double stranded break at one or more off-target sites comprises at least one mutation compared to the wildtype sequence at the one or more off-target sites. In embodiment 182 provided herein is the composition of embodiment 181 wherein the mutation comprises a synonymous mutation. In embodiment 183 provided herein is the composition of embodiment 181 or embodiment 182, wherein the mutation is in the PAM at the one or more off-target sites.

[0406] In embodiment 184 provided herein is a method comprising delivering the composition of any one of embodiments 121 through 183 to a population of cells. In embodiment 185 provided herein is the method of embodiment 184 further comprising expanding and/or differentiating cells in the population of cells. In embodiment 186 provided herein is the method of embodiment 184 or embodiment 185 further comprising adding a HDR enhancer to the growth medium prior to expanding and/or differentiating cells in the population of cells. In embodiment 187 provided herein is the method of embodiment 186 wherein the HDR enhancer comprises M3814. In embodiment 188 provided herein is the method of embodiment 187 wherein the M3814 concentration is at least 0.1, 0.25, 0.5, 0.75, 1, 1.25, 1.5, 1.75, 2, 2.5, 3, or 4 and/or not more than 0.25, 0.5, 0.75, 1, 1.25, 1.5, 1.75, 2, 2.5, 3, 4, or 5 μM, for example 0.1-5 μM. In embodiment 189 provided herein is the method of any one of embodiments 184 through 188 further comprising, before delivering the composition, combining the nucleic acid-guided nuclease complex with an anionic polymer. In embodiment 190 provided herein is the method of embodiment 189 wherein the anionic polymer comprises a non-specific ssODN or a peptide. In embodiment 191 provided herein is the method of embodiment 190 wherein the peptide comprises poly-L-glutamic acid (PGA). In embodiment 192 provided herein is the method of embodiment 190 wherein the composition comprises at least 50, 60, 70, 80, 90, 100, 150, 200, 250, 300, 350, 400, 450, 500, 550, 600, 700, 800, or 900 and/or not more than 60, 70, 80, 90, 100, 150, 200, 250, 300, 350, 400, 450, 500, 550, 600, 700, 800, 900 or 1000 pmol non-specific ssODN. In embodiment 193 provided herein is the method of embodiment 190 wherein the PGA is present at a concentration of at least 0.01, 0.05, 0.1, 0.15, 0.2, 0.25, 0.3, 0.35, 0.4, 0.45, 0.5, 0.55, 0.6, 0.65, 0.7, 0.75, 0.8, 0.85, 0.9, 0.95, 1, 1.5, 2, 2.5, 3, 3.5, 4, or 4.5 and/or not more than 0.05, 0.1, 0.15, 0.2, 0.25, 0.3, 0.35, 0.4, 0.45, 0.5, 0.55, 0.6, 0.65, 0.7, 0.75, 0.8, 0.85, 0.9, 0.95, 1, 1.5, 2, 2.5, 3, 3.5, 4, 4.5, or 5 μg μL⁻¹ per pmol RNP complex, for example 0.01-5 μg μL⁻¹ per pmol RNP complex. In embodiment 194 provided herein is the method of any one of embodiments 184 through 193 wherein the method produces a population of cells comprising a plurality of genotypes at the on-target site. In embodiment 195 provided herein is the method of any one of embodiments 184 through 194 wherein delivering comprises electroporation. In embodiment 196 provided herein is the method of any one of embodiments 184 through 195 wherein, after delivery, one or more cells in the population of cells are (A) expanded: (B) differentiated and then expanded: or (C) expanded, differentiated, and then expanded.

[0407] In embodiment 197 provided herein is a method comprising delivering a composition to a cell, wherein the composition comprises (A) a Type V nucleic acid-guided nuclease and a compatible gNA, or one or more polynucleotides encoding the nuclease and/or the gNA, and (B) a ssODN. In embodiment 198 provided herein is the method of embodiment 197 further comprising expanding and/or differentiating the cell.

[0408] In embodiment 199 provided herein is a composition for integrating at least a portion of a donor template at or near a strand break at an on-target or off-target site in a genome of a cell comprising (A) a donor template lacking one or both homology arms complementary to a sequence or sequences flanking the strand break; and (B) a first ssODN comprising (i) a first portion comprising a sequence complementary to at least a 5′ or 3′ portion of the donor template, and (ii) a second portion comprising a sequence homologous to a sequence flanking the strand break. In embodiment 200 provided herein is the composition of embodiment 199 further comprising: (C) a second ssODN comprising (i) a first portion comprising a sequence complementary to at least a 5′ or 3′ portion of the donor template different from the first ssODN, and (ii) a second portion comprising a sequence homologous to a sequence flanking the strand break.

[0409] In embodiment 201 provided herein is a method for integrating at least a portion of a donor template at a strand break in a target site in a genome of a cell comprising delivering to a cell a composition comprising (A) a composition of any one of embodiments 199 or 200 to the target cell; and (B) a nucleic acid guided nuclease complex comprising a nucleic acid-guided nuclease and a compatible gNA, wherein the complex is capable of producing the strand break. In embodiment 202 provided herein is the method of embodiment 201 further comprising expanding and/or differentiating the cell.

[0410] In embodiment 203 provided herein is a composition comprising a plurality of ssODNs comprising (A) a first ssODN comprising (i) a first portion comprising a sequence homologous to a sequence upstream of a target site in a genome of a target cell, and (ii) a second portion comprising a sequence comprising at least a portion of a heterologous sequence to be inserted into the genome of the target cell; (B) a second ssODN comprising (i) a first portion comprising a sequence homologous to a sequence downstream of a target site in a genome of a target cell, and (ii) a second portion comprising a sequence at least partially complementary to at least a portion of the heterologous sequence to be inserted into the genome of the target cell; and, optionally, (C) one or more additional ssODNs each comprising (i) a sequence comprising at least a portion of a heterologous sequence to be inserted into the genome of the target cell, and (ii) a second portion comprising a sequence at least partially complementary to at least a portion of the heterologous sequence to be inserted into the genome of the target cell; wherein the plurality of ssODNs comprises the entirety of heterologous sequence to be inserted into the genome of the target cell.

[0411] In embodiment 204 provided herein is a method for inserting a heterologous sequence at or near a target site in a genome of a cell comprising delivering the composition of embodiment 203 to the cell and a nucleic acid-guided nuclease complex capable of binding to and cleaving at the target site. In embodiment 205 provided herein is the method of embodiment 204 further comprising expanding and/or differentiating the cell.

[0412] In embodiment 206 provided herein is a method comprising contacting a population of cells with a composition comprising (A) a nucleic acid-guided nuclease complex comprising a nucleic acid-guided nuclease and a compatible gNA, wherein the complex can bind to and cleave at an on-target site and one or more off-target sites in the genomes of the cells in the population of cells, (B) a ssODN, and (C) one or more ssODNs for one or more of the off-target sites. In embodiment 207 provided herein is the method of embodiment 206 further comprising expanding and/or differentiating cells in the population of cells. In embodiment 208 provided herein is the method of any one of embodiments 206 or 207 wherein at least 20% of total genomic edits at the target site occurs through HDR. In embodiment 209 provided herein is the method of any one of embodiments 206 through 208 wherein a mutation rate at the one or more off-target sites is at least 20% lower than that of the same population of cells treated with the composition of embodiment 206 lacking (iii). In embodiment 210 provided herein is the method of embodiment any one of embodiments 206 through 209 further comprising adding a HDR enhancer to the growth medium prior to expanding and/or differentiating.

[0413] In embodiment 211 provided herein is a composition comprising (A) a guide RNA (gRNA) comprising (i) a first nucleotide sequence that hybridizes to a target nucleic acid sequence in a genome of a cell, and (ii) a second nucleotide sequence that interacts with a Cas nuclease; (B) the Cas nuclease, comprising an RNA-binding portion that interacts with the second nucleotide sequence of the guide RNA to form a ribonucleoprotein (RNP) complex, wherein the RNP complex (i) specifically binds to the target nucleic acid sequence at an on-target site and cleaves at or near the target nucleic acid sequence to create a double-stranded break in the on-target site, and (ii) also binds to one or more off-target nucleic acid sequences at one or more off-target sites and cleaves at or near the one or more off-target nucleic acid sequences to create a double-strand break in the one or more off-target sites; (C) a first, on-target ssODN comprising a sequence complementary to a sequence flanking the double stranded break in the on-target site, wherein the ssODN integrates into DNA in the on-target site; and (D) a second, off-target ssODN comprising a sequence complementary to a genomic sequence flanking a double stranded break in a first off-target site and integrates into the DNA in the off-target site, wherein the second ssODN comprises (i) homology arms for the off-target site that are more complementary to the genomic sequence at the off-target site than homology arms of the on-target ssODN. In embodiment 212 provided herein is the composition of embodiment 211 wherein the first ssODN comprises at least one nucleotide modification relative to nucleic acid sequence at the on-target site. In embodiment 213 provided herein is the composition of embodiment 211 wherein the second ssODN further comprises at least one synonymous mutation to reduce or eliminate re-cleavage at the off-target site following integration of the second ssODN. In embodiment 214 provided herein is the composition of embodiment 213 wherein the mutation is in a PAM sequence of the first off-target site. In embodiment 215 provided herein is the composition of embodiment 211 further comprising (ii) a nucleotide sequence to be inserted at the off-target site that is identical to a wild-type gene at the first off-target site. In embodiment 216 provided herein is the composition of embodiment 211 further comprising an HDR enhancer. In embodiment 217 provided herein is the composition of embodiment 211 further comprising a third ssODN for a second off-target site. In embodiment 218 provided herein is the composition of embodiment 211 further comprising a fourth ssODN for third off-target site. In embodiment 219 provided herein is the composition of embodiment 211 wherein gRNA is dual gRNA. In embodiment 220 provided herein is the composition of embodiment 211 wherein one or more nucleotides of the gRNA is chemically modified. In embodiment 221 provided herein is the composition of embodiment 211 wherein the nuclease is a Type V nuclease. In embodiment 222 provided herein is the composition of embodiment 221, wherein the Cas nuclease is a type V-A, type V-C, or type V-D Cas nuclease. In embodiment 223 provided herein is the composition of embodiment 222, wherein the Cas nuclease is a type V-A Cas nuclease. In embodiment 224 provided herein is the composition of embodiment 223 wherein the Type V-A Cas nuclease is a Cpf1, MAD, Csm1, ART, or ABW nuclease, or derivative or variant thereof.

### IX. EXAMPLES

### Example 1

[0414] In this example, a gRNA was selected for programmed disruption and single-stranded oligos (200 bp) were designed to create a targeted deletion of 25nt (spacer sequence+PAM) thereby creating a modified coding sequence with a frameshift and increasing the likelihood of dysfunctional protein.

[0415] The targeted ssODN template (Table 11) was transfected with RNPs in three primary Pan-T donors. Cell pools were harvested post recovery for genotypic evaluation (i.e. modification incorporation via NGS) and also functional analysis (FACS staining). The incorporation of randomized, NHEJ INDELs relative to HDR programmed in all cases show a significant increase in total modified cells. The increase in overall genomic modifications was conserved across a wide range of conditions (Lonza programs) and donors (three donors tested) and implies that the HDR-based approach can be a robust option for disruption optimization for further gene targets.

[0416] In addition, FACS analysis for functional disruption was completed in conjunction with genotypic characterization presented above and confirm a significant reduction in functional expression when the ssODN template is present in the RNP transfection for both the single or split (STAR) gRNA configurations. Further, it was observed that results in higher functional knock-out potential when compared with the other top gRNA's for the gene tested and that incorporation of the ssODN template results in complete TCR disruption.

[0417] Cell stocks transfected with RNP either with or without the ssODN appear to have slightly reduced viability when compared to the controls that were not transfected with RNP either by not including the buffer or electroporation step at Day 2 (77-86% compared to >95% in the no buffer, spin, and program controls). The impact is reduced by Day 3 (86-90% compared to >90% for the controls) and remains slightly lower throughout the 10-day time course.

[0418] Interestingly, inclusion of the ssODN appears to improve viability compared to RNP alone. This implies that the HDR pathway somewhat rescues cells from some of the toxicity effects of NHEJ repair alone.

[0419] Similar to the observation for viability, transfection with RNP alone (no ssODN) resulted in reduced expansion compared to the no program control and the no buffer control in which no editing occurs. Additionally, the incorporation of the ssODN resulted in expansion similar to that observed for the no buffer and no program controls. Data shown in FIG. 34. Briefly, FIG. 34, shows that inclusion of ssODN dramatically increases perfect HDR.

TABLE 11
exemplary ssODNs

| Name | SEQ ID NO | Sequence |
|---|---|---|
| SDN0001_T | 1799 | GCACAGTTTTGTCTGTGATATACACATCAGAATCCTTACTT |
| RAC43_del | | TGTGACACATTTGTTTGAGAATCAAAATCGGTGAATAGGCA |
| _2 | | GACAGACTTGTCACTGGAGCAGGGTCAGGGTTCTGGATATC |
| | | TGTGGGACAAGAGGATCAGGGTTAGGACATGATCTCATTTC |
| | | CCTCTTTGCCCCAACCCAGGCTGGAGTCCAGATGCC |
| SDN0002_B | 1800 | CAACTTTCAGCAGCTTACAAAAGAATGTAAGACTTACCCCA |
| 2M30_del | | CTTAACTATCTTGGGCTGTGACAAAGTCACATGGTTCACAC |
| | | GGCAGGCATACTCATCTTGTACAAGAGATAGAAAGACCAGT |
| | | CCTTGCTGAAAGACAAGTCTGAATGCTCCACTTTTTCAATT |
| | | CTCTCTCCATTCTTCAGTAAGTCAACTTCAATGTCG |
| SDN0003_C | 1801 | ATCCTCACCCCCATCCCCAATTCAGAATGGTTTCTCTGTTT |
| IITA32_del | | ATCTGGAATGGCAGGACCAGCTGAGACTGCACGCTAAATTA |
| | | AGATGCTTTCCCGGCCTTGACCCAGCAGGGCGTGGAGCCAG |
| | | GCAACGCATTGTGTAGGAATCCCAGCCAGGCAGCAGCTCCC |
| | | GGAGTCTGGCAGCCCCTCCTCGTGCCCTCAGCTTCC |
| SDN000_T | 1802 | GCACAGTTTTGTCTGTGATATACACATCAGAATCCTTACTT |
| RAC43_del | | TGTGACACATTTGTTTGAGAATCAAAATCGGTGAATAGGCA |
| _2_mod | | GACAGACTTGTCACTGGAGCAGGGTCAGGGTTCTGGATATC |
| | | TGTGGGACAAGAGGATCAGGGTTAGGACATGATCTCATTTC |
| | | CCTCTTTGCCCCAACCCAGGCTGGAGTCCAGATGCC |
| SDN0005_T | 1803 | ACCCTGCCGTGTACCAGCTGAGAGACTCTAAATCCAGTGAC |
| RAC049_del | | AAGTCTGTCTGCCTATTCACCGATTTTGATTCTCAAACAAA |
| 2stop_s | | TGTGTCACAAAGTAAGGATTGATAAACTGTGCTAGACATGA |
| | | GGTCTATGGACTTCAAGAGCAACAGTGCTGTGGCCTGGAGC |
| | | AACAAATCTGACTTTGCATGTGCAAACGCCTTCAAC |
| SDN0006_T | 1804 | GTTGAAGGCGTTTGCACATGCAAAGTCAGATTTGTTGCTCC |
| RAC049_del | | AGGCCACAGCACTGTTGCTCTTGAAGTCCATAGACCTCATG |
| 2stop_as | | TCTAGCACAGTTTATCAATCCTTACTTTGTGACACATTTGT |
| | | TTGAGAATCAAAATCGGTGAATAGGCAGACAGACTTGTCAC |
| | | TGGATTTAGAGTCTCTCAGCTGGTACACGGCAGGGT |
| SDN0007_T | 1805 | CGAAGGCACCAAAGCTGCCCTTACCTGGGCIGGGGAAGAAG |
| RAC051_del | | GTGTCTTCTGGAATAATGCTGTTGTTGAAGGCGTTTGCACA |
| 2stop_as | | TGCAAAGTCAGATTATCAGTTGCTCTTGAAGTCCATAGACC |
| | | TCATGTCTAGCACAGTTTTGTCTGTGATATACACATCAGAA |
| | | TCCTTACTTTGTGACACATTTGTTTGAGAATCAAAA |
| T12_g1_TR | 1806 | TCCGTGCTGACCCCACTGTGCACCTCCTTCCCATTCACCCA |
| BC1_del | | CCAGCTCAGCTCCACGTGGTCAGGGAAGAAGCCTGTGGCCA |
| | | GGCACACCAGTGTGGCCTTGATGGCTCAAACACAGCGACCT |
| | | CGGGTGGGAACACCTTGTTCAGGTCCTCTGGAAAGGGAAGA |
| | | GGGGTTGGAGCCAGGGTTGCTCTGAGAGCTGTCTGG |
| T12_g1_TR | 1807 | TCCGTGCTGACCCCACTGTGCACCTCCTTCCCATTCACCCA |
| BC2_del | | CCAGCTCAGCTCCACGTGGTCAGGGAAGAAGCCTGTGGCCA |
| | | GGCACACCAGTGTGGCCTTGATGGCTCAAACACAGCGACCT |
| | | CGGGTGGGAACACCTTGTTCAGGTCCTCTGGAAAGGGAAGA |
| | | GGGGTTGGAGCCAGGGTTGCTCTGAGAGCTGTCTGG |
| T12_g3_TR | 1808 | CCCCTACCAGAACCAGACAGCTCTCAGAGCAACCCIGGCTC |
| BC1_del | | CAACCCCTCTTCCCTTTCCAGAGGACCTGAACAAGGTGTTC |
| | | CCACCCGAGGTCGCTGTGCCCACACCCAAAAGGCCACACTG |
| | | GTGTGCCTGGCCACAGGCTTCTTCCCTGACCACGTGGAGCT |
| | | GAGCTGGTGGGTGAATGGGAAGGAGGTGCACAGTGG |
| T12_g3_TR | 1809 | CCCCTACCAGGACCAGACAGCTCTTAGAGCAACCCTAGCCC |
| BC2_del | | CATTACCTCTTCCCTTTCCAGAGGACCTGAAAAACGTGTTC |
| | | CCACCCAAGGTCGCTGTGCCCACACCCAAAAGGCCACACTG |
| | | GTGTGCCTGGCCACAGGCTTCTACCCCGACCACGTGGAGCT |
| | | GAGCTGGTGGGTGAATGGGAAGGAGGTGCACAGTGG |
| CSF2_g3_ | 1810 | ACACTGCTGCTGAGATGGTAAGTGAGAGAATGTGGGCCTGT |
| del | | GCCTAGGCCACCCAGCTGGCCCCTGACTGGCCACGCCTGTC |
| | | AGCTTGATAACATGACATTAGAAGTCATCTCAGAAATGTTT |
| | | GACCTCCAGGTAAGATGCTTCTCTCTGACATAGCTTTCCAG |
| | | AAGCCCCTGCCCTGGGGTGGAGGTGGGGACTCCATT |
| CSF2_g5_ | 1811 | CTGCTGAGATGGTAAGTGAGAGAATGTGGGCCTGTGCCTAG |
| del | | GCCACCCAGCTGGCCCCTGACTGGCCACGCCTGTCAGCTTG |
| | | ATAACATGACATTTTCCTTCATCTCAGAAATGTTTGACCTC |
| | | CAGGTAAGATGCTTCTCTCTGACATAGCTTTCCAGAAGCCC |
| | | CTGCCCTGGGGTGGAGGTGGGGACTCCATTTTAGAT |
| CSF2_g7_ | 1812 | AAGCCCTACTCCTGGGGGCTGGGGGCAGCAGCAAAAAGGAG |
| del | | TGGTGGAGAGTTCTTGTACCACTGTGGGCACTTGGCCACTG |
| | | CTCACCGACGAACGACATAGACCCGCCTGGAGCTGTACAAG |
| | | CAGGGCCTGCGGGGCAGCCTCACCAAGCTCAAGGGCCCCTT |
| | | GACCATGATGGCCAGCCACTACAAGCAGCACTGCCC |
| CD3E_24_ | 1813 | AATTCTGAAAATTCCTTCAGTGACAGGTGatcctcatcact |
| del | | gcctatgtttttatcatcctcatcaccgcctatgtttttat |
| | | catTGTGTTGCCATAGTATGTCAATATTACTGTGGTTCCAG |
| | | AGATGGAGACTTTATATGCTGGGGAGAAAGAAGGGAAATTG |
| | | GCAGAAGAAACCAGGACAATTTTAGAAAAGGCAAAT |
| CD3E_34_ | 1814 | GCCCTTTTGAATGGTCCTCCCTAAAGAGCCGGTGGTACCTG |
| del | | TTCTGGAGACCTGGATTACCTCTTGCCCTCAGGTAGAGATA |
| | | AAAGTTCGCATCTTCTGGTAATAACCACTTTGCTCCAATTC |
| | | TGAAAATTCCTTCAGTGACAGGTGatcctcatcactgccta |
| | | tgtttttatcatcctcatcaccgcctatgtttttat |
| SDN0017_C | 1815 | AGAGGAGTTTAACCATTAGGTAACATGACTTCGGCATCCCA |
| D40LG_40_ | | GCCTTTCCCCTTGGGTGGCTACCGCTCAGATGCTGTGTGAC |
| delstop | | TTACCAGATGTTGTTttaATGTGCCGCAATTTGAGGATTCT |
| | | GATCACCTGAAATGGAACCAAAAACTGTCAGGCTAAAATAA |
| | | TGCAAAAACTGCCCACAAAACTATCTGGTCCAGTTC |
| SDN0018_C | 1816 | AAATGGGAAACAGCTGACCGTTAAAAGACAAGGACTCTATT |
| D40LG_53_ | | ATATCTATGCCCAAGTCACCTTCTGTTCCAATCGGGAAGCT |
| delstop | | TCGAGTCAAGCTCCATTaCCCCCGGTAGATTCGAGAGAATC |
| | | TTACTCAGAGCTGCAAATACCCACAGTTCCGCCAAACCTTG |
| | | CGGGCAACAATCCATTCACTTGGGAGGAGTATTTGA |
| SDN0019_C | 1817 | TGCGAGGTACCTGAAGCGGCTGCAGCCGGGGACACTGCGGG |
| IITA_65_ | | CGCGGCAGCTGCTGGAGCTGCTGCACTGCGCCCACGAGGCC |
| delstop | | GAGGAGGCTGGAATTTGaCCCCGGCCGCCTCTCTTTTCTGG |
| | | GCACCCGCCTCACGCCTCCTGATGCACATGTACTGGGCAAG |
| | | GCCTTGGAGGCGGCGGGCCAAGACTTCTCCCTGGAC |
| SDN0020_C | 1818 | tctaaaaaaacaaaTTTAAATTAATTTTGAAAAAGTCAGCC |
| IITA_80_ | | GGACTTTGGGGGCCCGATTCAGCAGGAAGGGCAGGCCCAGC |
| delstop | | TCACTCACTTGAGGGtaaGGTGGCTGAGAGCTGCGAGACAC |
| | | CCTCGTCCCCGATCTTGTTCTCACTCAGCGCATCCAGGCTG |
| | | CAGGTGGAATCAGATGGGGGCCATCAGCTAGCGTCC |
| SDN0021_T | 1819 | TGCTGACCCCACTGTGCACCTCCTTCCCATTCACCCACCAG |
| 12_g1_TRB | | CTCAGCTCCACGTGGTCGGGGTAGAAGCCTGTGGCCAGGCA |
| C2_del | | CACCAGTGTGGCCTTTTGTGATGGCTCAAACACAGCGACCT |
| | | TGGGTGGGAACACGTTTTTCAGGTCCTCTGGAAAGGGAAGA |
| | | GGTAATGGGGCTAGGGTTGCTCTAAGAGCTGTCTGG |

### Example 2

[0420] Conditions were the same as Example 1, and in addition after transfection the cells were treated with the HDR enhancer M3814 for 24 hours to block the NHEJ pathway and 5 thereby increase the incorporation of the ssODN at the on-target side. The enhancer increased perfect HDR by 1.5 fold.

### Example 3: Culture of Jurkat Human T-Cell Leukemia Cell Line and Primary Human T-Cells

[0421] Human Jurkat T-cell leukemia cells (Leibniz Institute DSMZ-German Collection of Microorganisms and Cell Cultures GmbH (ACC 282)) were propagated in RPMI 1640 medium (Thermo Fisher Scientific) with 10% heat-inactivated fetal bovine serum (FBS) (ThermoFisher Scientific) supplemented with 1% penicillin-streptomycin antibiotic mix (ThermoFisher Scientific). Cells were cultured at 37° C., in 5% CO2 incubators and maintained at a density of 0.5 to 1.5×10⁶ cells mL⁻¹. 24 hours before transfection, cells were passaged at 0. 1×10⁶ cell mL⁻¹. Cell culture media supernatant was periodically tested for mycoplasma contamination using the MycoAlert PLUS mycoplasma detection kit (Lonza).

### Example 4: Primary T-Cell Isolation and Culture

[0422] T-cells were isolated from human peripheral blood obtained from healthy adults by immune-magnetic negative selection using the EasySep Human T-cell Isolation Kit (STEMCELL Technologies). After isolation, T-cells were activated in 25 μL mL⁻¹ ImmunoCult Human CD3/CD28/CD2 T-Cell Activator (STEMCELL Technologies) in ImmunoCult-XF T-Cell Expansion Medium (STEMCELL Technologies) containing 12.5 ng mL⁻¹ Human Recombinant IL-2, 5 ng mL⁻¹ IL-7, and 5 ng mL⁻¹ IL-15 (STEMCELL Technologies) and seeded at 1.0×10⁶ cells mL⁻¹. Until transfection 48 hours later, the cells were cultured at 37° C., in 5% CO2 incubators.

### Example 5: RNP Formulation

[0423] Ribonucleoprotein complexes (RNPs) were generated by incubating respective guide nucleic acids (gNAs) with MAD7 in the molar ratio of 3:2 gNA: MAD7 for 15 minutes at room temperature immediately before transfection. For Jurkat experiments, the RNP complexes were generated by mixing the respective gNA (150 μmol), MAD7 (100 μmol), and nuclease-free water, unless otherwise stated. For T-cell experiments, 1.6 μL of an aqueous solution of 15-50 kDa poly-L-glutamic acid (PGA, 100 μg μL⁻¹, Alamanda Polymers) was added to gNAs, followed by the addition of MAD7 and nuclease-free water.

### Example 6: Generation of Donor Template Via PCR Amplification

[0424] Donor templates comprising site-specific homology arms, respective promoter, and respective gene (GFP or Hu19 scFv-CD8a-CD28-CD3ζ CAR) were amplified from corresponding pTwist Ampicillin high-copy plasmids (Twist Bioscience) using homology arms-specific PCR primers. Donor templates were amplified in a two-step PCR program: initial denaturation at 98° C., for 30 seconds, cycle denaturation at 98° C., for 10 seconds, extension at 72° C., for 30 seconds per kb amplicon for 40-cycles with a hold at 72° C., for 10 minutes. Each 50 μL PCR reaction contained 10 ng amplification template (plasmid DNA), 0.5 μM homology arm-specific forward and reverse primers, nuclease-free water (IDT), 3% DMSO, and 1x Phusion High-Fidelity PCR Master Mix with HF Buffer (ThermoFisher Scientific). PCR products were purified using NucleoSpin Gel and PCR Clean-up Kit (Macherey-Nagel) with two 20 μL elutions. Purified HDR templates were collected and quantified on NanoDrop One Microvolume UV-Vis Spectrophotometer (ThermoFisher Scientific). Templates were concentrated using Amicon Ultra 0.5 mL 30K Centrifugal Filters: 100 μg DNA per unit was transferred, filled with nuclease-free water to 500 μL, and centrifuged at 10,000 g for 10 minutes to reduce volume to 50 μL. DNA was washed twice with nuclease-free water and recovered into a fresh tube by inversion and centrifugation at 10,000 g for 15 seconds. HDR templates were collected, diluted, and concentrations quantified using Qubit dsDNA HS Assay Kit (ThermoFisher Scientific). HDR templates of 0.5 to 1 μg μL⁻¹ were used for cellular studies.

### Example 7: Jurkat Cell Transfection

[0425] Lonza 4D Nucleofector with Shuttle unit (V4SC-2960 Nucleocuvette Strips) was used for transfection, following the manufacturer's instructions. For transfection, cells were harvested by centrifugation (200 g. RT, 5 minutes) and re-suspended in 20 μL at 10×10⁶ cells mL⁻¹ in the SF Cell Line Nucleofector X Kit buffer (Lonza), unless stated otherwise. The cell suspension was mixed with the RNPs, immediately transferred to the nucleocuvette, and transfected. After transfection, the cells were immediately re-suspended in the pre-warmed cultivation medium and plated onto 96-well, flat-bottom, non-cell culture treated plates (Falcon), and cultured at 37° C., in 5% CO₂ incubators and maintained at a density of 0.5 to 1.0×10⁶ cells mL⁻¹. After 48 hours, the cells were harvested for the viability assay and genomic DNA, as described below. For the Homology-Directed Repair Template insertion, the HDR template was added to the cells and the suspension transferred to the RNPs immediately before transfection. The transfection parameters, cell recovery step, and proliferation conditions as described in Example 1. The cells were harvested 48 hours post-transfection for the viability assessment, after 7 days for CAR insertion efficiency, or after 7 days, 14 days, and 21 days for GFP insertion efficiency.

### Example 8: Primary T-Cell Transfection

[0426] 48 hours after isolation, the cells were harvested by centrifugation (300 g, RT, 5 minutes) and re-suspended in 20 μL at 50×10⁶ cells mL⁻¹ in the supplemented P3 Primary Cell Nucleofector Kit buffer (Lonza). The cells were mixed with HDR templates and the suspension transferred to the RNPs immediately before transfection (Nucleofection program EH-115). After transfection, 80 μL of pre-warmed cultivation medium without IL-2 was added to the electroporation cuvettes. When using M3814 (Selleckchem), 80 μL of pre-warmed cultivation medium containing 2 μM M3814 final concentration without IL-2 was added to the electroporation cuvettes. After 10 minutes of incubation at 37° C., T-cells were transferred onto 96-well, flat-bottom, non-cell culture treated plates (Falcon) containing pre-warmed cultivation medium pretreated with 2 μM M3814 final concentration and 12.5 ng mL⁻¹ IL-2. The cells were seeded at a density of 0.25×10⁶ cells mL⁻¹, or 1.3×10⁶ cells mL⁻¹ in the experiment with M3814, and kept at 37° C., in 5% CO₂ incubators. The viability assay was carried out 24 hours post-transfection after which the cells were reseeded in the fresh cultivation medium containing IL-2. Insertion efficiency of CAR was measured after 7 days, and 11 days or 13 days post-transfection.

### Example 9: Flow Cytometry

[0427] Flow cytometric assessments were carried out on a CytoFLEX S instrument (Beckmen Coulter) using a 96-well plate format. Measurements of cell viability, PDCD1 expression, GFP expression, and CAR expression were performed on 10,000 or 20,000 single cell events in Jurkat or primary T-cells, respectively.

[0428] For the cell viability and GFP knock-in measurements, approximately 250,000 cells per sample were transferred onto 96-well V-bottom cell culture plates and assessed following a series of consecutive washing and staining steps. The first step included centrifuging the cells at 300 g for 5 minutes at room temperature, discarding the supernatant, and washing cells in 150 μL Dulbecco's PBS/2% FBS (STEMCELL Technologies) or Cell Staining Buffer (Biolegend), respectively, followed by the second centrifugation and removal of supernatant. The final step included viability staining of cells using 150 μL Dulbecco's PBS/2% FBS with 7-amino-actinomycin D (7-AAD, 1:1,000: ThermoFisher) or 50 μL Cell Staining Buffer with Zombie Violet Dye (1:200: Biolegend), respectively. The measurements of cell viability and GFP expression were collected simultaneously for 7-AAD (excitation: yellow-green laser; emission; 561 nm), Zombie Violet (excitation: violet laser; emission 405 nm), and GFP (excitation: blue laser; emission 488 nm) as needed.

[0429] For detection of CAR knock-in efficiency, approx. 250,000 cells per sample were transferred onto 96-well V-bottom, washed as described above using Cell Staining Buffer, and re-suspended in 50 μL Cell Staining Buffer with PE Anti-Myc tag antibody [9E10] (1:50; Abcam) and Zombie Violet Dye (1:200; Biolegend) for 30 minutes. Afterwards, the cells were washed in two subsequent washing steps using 150 μL Cell Staining Buffer, and finally re-suspended in 100 μL Cell Staining Buffer for the flow cytometry measurements (excitation: yellow-green laser; emission: 561 nm).

[0430] For detection of PDCD1 knock-out efficiency, approx. 250,000 Jurkat cells per sample were transferred onto 96-well V-bottom cell culture plates and assessed following a series of consecutive washing and staining steps. The first step included centrifuging the cells at 300 g for 5 minutes at 4° C., and discarding the supernatant. Afterwards, the cells were stained using 100 μL Cell Staining Buffer (Biolegend) with APC/Cyanine7 anti-human CD279 (PD-1) antibody (1:100: Biolegend) and incubated for 30 minutes at 4° C., in the dark. The cells were then centrifuged at 300 g for 5 minutes at 4° C., and the supernatant discarded. The next step included two repeats of centrifugation at 300 g for 5 minutes at 4° C., supernatant removal, and cell washing in 150 μL ice-cold Cell Staining Buffer (Biolegend). In the final step, the cells were re-suspended in 100 μL Cell Staining Buffer for the flow cytometry measurements (excitation: red laser; emission: 633 nm).

### Example 10: DNA Extraction

[0431] Cells were harvested 48-h post-transfection by centrifugation (1,000 g, 10 minutes) in 96-well, V-bottom plates (Greiner), washed with PBS (Sigma Aldrich) and lysed in 20 μL Quick Extract DNA Extraction Solution (Epicentre, Lucigen). DNA was extracted following the manufacturer's protocol: 15 minutes at 65° C., 15 minutes at 68° C., 10 minutes at 95° C., cooled to 4° C., and stored at 4° C. Genomic DNA was diluted 20-fold in nuclease-free water before amplicon PCR reactions.

### Example 11: Amplicon Sequencing

[0432] Extracted genomic DNA was quantified using the NanoDrop (ThermoFisher Scientific). Amplicons were constructed in two PCR steps: in the first PCR, regions of interest (150-400 bp) were amplified from 10 to 30 ng of genomic DNA with primers containing Illumina forward and reverse adapters on both ends comprising loci-specific complementary sequences as shown in Table 12, using Phusion High-Fidelity PCR Master Mix (ThermoFisher Scientific). Amplification products were purified with Agencourt AMPure XP beads (Ramcon), using the sample to beads ratio of 1:1.8. The DNA was eluted from the beads with nuclease-free water and the size of the purified amplicons analyzed on a 2% agarose E-gel using the E-gel electrophoresis system (ThermoFisher Scientific). In the second PCR, unique pairs of Illumina-compatible indexes (Nextera XT Index Kit v2) were added to the amplicons using the KAPA HiFi HotStart Ready Mix (Roche). The amplified products were purified with Agencourt AMPure XP beads (Ramcon), using the sample to bead ratio of 1:1.8. The DNA was eluted from the beads with 10 mM Tris-HCl pH 8.5, 0.1% Tween 20. Sizes of the purified DNA fragments were validated on a 2% agarose gel using the E-gel electrophoresis system (ThermoFisher Scientific), quantified using Qubit dsDNA HS Assay Kit (Thermo Fisher) and then pooled in equimolar concentrations. Quality of the amplicon library was validated using Bioanalyzer, High Sensitivity DNA Kit (Agilent) before sequencing. The final library was sequenced on Illumina MiSeq System using the MiSeq Reagent Kit v.2 (300 cycles, 2×250 bp, paired-end reads). De-multiplexed FASTQ files were obtained from BaseSpace (Illumina).

TABLE 12
Primer sequences

| | SEQ | | SEQ | |
|---|---|---|---|---|
| | ID | | ID | |
| Name | NO | Forward primer | NO | Reverse primer |
| crCD247 | 385 | TGGGGAGGTAGCTGC | 684 | CTAGAAGTTCCCTGCCG |
| _1 | | AGAAT | | TCG |
| crCD247 | 386 | TGGGGAGGTAGCTGC | 685 | CTAGAAGTTCCCTGCCG |
| _2 | | AGAAT | | TCG |
| crCD247 | 387 | TGGGGATGTGTTCTC | 686 | GCCCCTCTGAACATCCA |
| _3 | | GTCAC | | TCA |
| crCD247 | 388 | GGTAGCACAGGGAGG | 687 | GCCCTTCCTCCAACTTT |
| _4 | | AGAGA | | CCA |
| crCD247 | 389 | TTAGTTGCCAAGGAG | 688 | GGCGAGGCTGACTTACG |
| _5 | | CGGAG | | TTA |
| crCD247 | 390 | GCCCTTCCTCCAACT | 689 | GGTAGCACAGGGAGGAG |
| _6 | | TTCCA | | AGA |
| crCD247 | 391 | GGTAGCACAGGGAGG | 690 | GCCCTTCCTCCAACTTT |
| _7 | | AGAGA | | CCA |
| crCD247 | 392 | CGTGTCTGGAGGACC | 691 | CTGGTTGTGGGCAGAGA |
| _8 | | AAGAG | | AGT |
| crCD247 | 393 | CTGGTTGTGGGCAGA | 692 | CGTGTCTGGAGGACCAA |
| _9 | | GAAGT | | GAG |
| crCD247 | 394 | TGCAGCTGGGATGAG | 693 | TGGAGCCTTGATTGTGG |
| _10 | | AAGTG | | GAG |
| crCD247 | 395 | TGCAGCTGGGATGAG | 694 | TGGAGCCTTGATTGTGG |
| _11 | | AAGTG | | GAG |
| crCD247 | 396 | GGCCTCACCTTACTC | 695 | ATCTTGCCCCTTGTCAG |
| _12 | | TGCAG | | GTG |
| crCD247 | 397 | GGCCTCACCTTACTC | 696 | ATCTTGCCCCTTGTCAG |
| _13 | | TGCAG | | GTG |
| crCD247 | 398 | GGCCTCACCTTACTC | 697 | ATCTTGCCCCTTGTCAG |
| _14 | | TGCAG | | GTG |
| crCD247 | 399 | TAAACCCAAGACTCT | 698 | TTAGTTGCCAAGGAGCG |
| _15 | | GGCGG | | GAG |
| crCD247 | 400 | ACAGCACCCATCTAC | 699 | GTCTGGCCTTTGAGTGG |
| _16 | | CAACG | | TGA |
| crCD247 | 401 | ACAGCACCCATCTAC | 700 | GTCTGGCCTTTGAGTGG |
| _17 | | CAACG | | TGA |
| crCD247 | 402 | ACAGCACCCATCTAC | 701 | GTCTGGCCTTTGAGTGG |
| _18 | | CAACG | | TGA |
| crCD247 | 403 | CAGGGGGATTATTCC | 702 | ATAATCTGGGCGTCTGC |
| _19 | | TGGGC | | AGG |
| crCD247 | 404 | TATGGCGCCCTTTGA | 703 | TGTGTTGCAGTTCAGCA |
| _20 | | GACAG | | GGA |
| crCD247 | 405 | GCCCCTGCCCCTCTT | 704 | TGGTTGCAGAGTGAGCT |
| _21 | | TTTAT | | GAG |
| crCD247 | 406 | GCCCCTGCCCCTCTT | 705 | TGGTTGCAGAGTGAGCT |
| _22 | | TTTAT | | GAG |
| crCD247 | 407 | TGGTTGCAGAGTGAG | 706 | GCCCCTGCCCCTCTTTT |
| _23 | | CTGAG | | TAT |
| crCD247 | 408 | TGGTTGCAGAGTGAG | 707 | GCCCCTGCCCCTCTTTT |
| _24 | | CTGAG | | TAT |
| crCD247 | 409 | GCCCCTGCCCCTCTT | 708 | TGGTTGCAGAGTGAGCT |
| _25 | | TTTAT | | GAG |
| crCD247 | 410 | GGTAGCACAGGGAGG | 709 | GCCCTTCCTCCAACTTT |
| _26 | | AGAGA | | CCA |
| crCTLA4 | 411 | ATCATGTAGGTTGCC | 710 | GGCCATGAAGGAGCATG |
| _1 | | GCACA | | AGT |
| crCTLA4 | 412 | TCACTGCCTTTGACT | 711 | TGAAGACCTGAACACCG |
| _2 | | GCTGA | | CTC |
| crCTLA4 | 413 | AAATCTGGGTTCCGT | 712 | AGGTGACTGAAGTCTGT |
| _3 | | TGCCT | | GCG |
| crCTLA4 | 414 | GGCCATGAAGGAGCA | 713 | ATCATGTAGGTTGCCGC |
| _4 | | TGAGT | | ACA |
| crCTLA4 | 415 | AGTCCTTGATTCTGT | 714 | CCTCCTCCATCTTCATG |
| _5 | | GTGGGT | | CTCC |
| crCTLA4 | 416 | CCTCCTCCATCTTCA | 715 | AGTCCTTGATTCTGTGT |
| _6 | | TGCTCC | | GGGT |
| crCTLA4 | 417 | AAGCTAGAAGGCAGA | 716 | ATCATGTAGGTTGCCGC |
| _7 | | AGGGC | | ACA |
| crCTLA4 | 418 | AAGCTAGAAGGCAGA | 717 | ATCATGTAGGTTGCCGC |
| _8 | | AGGGC | | ACA |
| crCTLA4 | 419 | GGCCATGAAGGAGCA | 718 | ATCATGTAGGTTGCCGC |
| _9 | | TGAGT | | ACA |
| crCTLA4 | 420 | GGCCATGAAGGAGCA | 719 | ATCATGTAGGTTGCCGC |
| _10 | | TGAGT | | ACA |
| crCTLA4 | 421 | CATGCTAGCAATGCA | 720 | TGATTTCCACTGGAGGT |
| _11 | | CGTGG | | GCC |
| crCTLA4 | 422 | CATGCTAGCAATGCA | 721 | TGATTTCCACTGGAGGT |
| _12 | | CGTGG | | GCC |
| crCTLA4 | 423 | CATCGCCAGCTTTGT | 722 | GAGCTCCACCTTGCAGA |
| _13 | | GTGTG | | TGT |
| crCTLA4 | 424 | AGTCCTTGATTCTGT | 723 | CCTCCTCCATCTTCATG |
| _14 | | GTGGGT | | CTCC |
| crCTLA4 | 425 | AGGTGACTGAAGTCT | 724 | AAATCTGGGTTCCGTTG |
| _15 | | GTGCG | | CCT |
| crCTLA4 | 426 | AGGTGACTGAAGTCT | 725 | AAATCTGGGTTCCGTTG |
| _16 | | GTGCG | | CCT |
| crCTLA4 | 427 | AGGTGACTGAAGTCT | 726 | AAATCTGGGTTCCGTTG |
| _17 | | GTGCG | | CCT |
| crCTLA4 | 428 | CATCTGCAAGGTGGA | 727 | GGTTGCCACCCACAATA |
| _18 | | GCTCA | | AGC |
| crCTLA4 | 429 | TCTGCAAGGTGGAGC | 728 | GGTTGCCACCCACAATA |
| _19 | | TCATG | | AGC |
| crCTLA4 | 430 | GCAATTTAGGGGTGG | 729 | CATCAGCACCACACTCA |
| _20 | | ACCTCA | | CCA |
| crCTLA4 | 431 | GCAATTTAGGGGTGG | 730 | CATCAGCACCACACTCA |
| _21 | | ACCTCA | | CCA |
| crCTLA4 | 432 | AATGTTGGGGAGTAG | 731 | ATCCCCATCAGACATGG |
| _22 | | AGCCC | | TGC |
| crCTLA4 | 433 | CAATGTTGGGGAGTA | 732 | GCACCACACTCACCATT |
| _23 | | GAGCCCT | | TTGCT |
| crCTLA4 | 434 | ATGTTGGGGAGTAGA | 733 | ATCCCCATCAGACATGG |
| _24 | | GCCCT | | TGC |
| crCTLA4 | 435 | AGTCCTTGATTCTGT | 734 | CCTCCTCCATCTTCATG |
| _25 | | GTGGGT | | CTCC |
| crCTLA4 | 436 | ATGTTGGGGAGTAGA | 735 | ATCCCCATCAGACATGG |
| _26 | | GCCCT | | TGC |
| crCTLA4 | 437 | ATGTTGGGGAGTAGA | 736 | ATCCCCATCAGACATGG |
| _27 | | GCCCT | | TGC |
| crCTLA4 | 438 | ATGTTGGGGAGTAGA | 737 | ATCCCCATCAGACATGG |
| _28 | | GCCCT | | TGC |
| crCTLA4 | 439 | ATGTTGGGGAGTAGA | 738 | ATCCCCATCAGACATGG |
| _29 | | GCCCT | | TGC |
| crCTLA4 | 440 | AGGGACCCAATATGT | 739 | TGCCTCAGCTCTTGGAA |
| _30 | | GTTGAGT | | ATTG |
| crCTLA4 | 441 | AGGGACCCAATATGT | 740 | TGCCTCAGCTCTTGGAA |
| _31 | | GTTGAGT | | ATTG |
| crCTLA4 | 442 | AGGGACCCAATATGT | 741 | TGCCTCAGCTCTTGGAA |
| _32 | | GTTGAGT | | ATTG |
| crCTLA4 | 443 | TGGTTAGAAGTGGCT | 742 | AGAATTGCCTCAGCTCT |
| _33 | | TCCGT | | TGGA |
| crCTLA4 | 444 | TGGTTAGAAGTGGCT | 743 | AGAATTGCCTCAGCTCT |
| _34 | | TTCCG | | TGGA |
| crCTLA4 | 445 | TGGTTAGAAGTGGCT | 744 | AGAATTGCCTCAGCTCT |
| _35 | | TTCCG | | TGGA |
| crCTLA4 | 446 | CCCTCTTACAACAGG | 745 | TGGGTTCCGCATCCAAC |
| _36 | | GGTCT | | TTT |
| crCTLA4 | 447 | CCCTCTTACAACAGG | 746 | TGGGTTCCGCATCCAAC |
| _37 | | GGTCT | | TTT |
| crCTLA4 | 448 | TGAAGACCTGAACAC | 747 | TCACTGCCTTTGACTGC |
| _38 | | CGCTC | | TGA |
| crCTLA4 | 449 | TGAAGACCTGAACAC | 748 | TCACTGCCTTTGACTGC |
| _39 | | CGCTC | | TGA |
| crCTLA4 | 450 | AAGCTAGAAGGCAGA | 749 | ATCATGTAGGTTGCCGC |
| _40 | | AGGGC | | ACA |
| crCTLA4 | 451 | AAGCTAGAAGGCAGA | 750 | ATCATGTAGGTTGCCGC |
| _41 | | AGGGC | | ACA |
| crLAG3_ | 452 | TAGTGAAGCCTCTCC | 751 | AGGGAGTGACACCTCAG |
| 1 | | AGCCA | | GG |
| crLAG3_ | 453 | CCAAGTGAGTGCAGG | 752 | GTGTCCAGAGAGCTCCA |
| 2 | | GTGAT | | CAC |
| crLAG3_ | 454 | TGGGGAAGCTGCTTT | 753 | TTTGGGTCCTGGCATTC |
| 3 | | GTGAG | | TGG |
| crLAG3_ | 455 | CTGGATCCCTGGGGA | 754 | TGGCGTTTGGGTCCTGG |
| 4 | | AGCTGCT | | CATTC |
| crLAG3_ | 456 | CCAAGTGAGTGCAGG | 755 | CCAGCCAAGGTCCTGAG |
| 5 | | GTGAT | | AAA |
| crLAG3_ | 457 | CCTTTTGGAGGGCTC | 756 | CCAGAGAGGCTTTCGGG |
| 6 | | AGCGCTG | | GTGGA |
| crLAG3_ | 458 | CTGAGATGGGGAGAG | 757 | TTCCGGAACCAATGCAC |
| 7 | | GGTGA | | AGA |
| crLAG3_ | 459 | TCCAGTGGGCTGATG | 758 | CTTGGGGCAGGAAGAGG |
| 8 | | AAGTC | | AAG |
| crLAG3_ | 460 | TCCAGTGGGCTGATG | 759 | CTTGGGGCAGGAAGAGG |
| 9 | | AAGTC | | AAG |
| crLAG3_ | 461 | GGATCTCTCAGAGCC | 760 | CTGTAGGTGAGGATGCA |
| 10 | | TCCGA | | GCC |
| crLAG3_ | 462 | GGATCTCTCAGAGCC | 761 | CTGTAGGTGAGGATGCA |
| 11 | | TCCGA | | GCC |
| crLAG3_ | 463 | GCCCAGCCTCTGTGC | 762 | GGGGGCAGGAAGGAGTT |
| 12 | | ATTGGTT | | GTGGT |
| crLAG3_ | 464 | GCCCAGCCTCTGTGC | 763 | GGGGGCAGGAAGGAGTT |
| 13 | | ATTGGTT | | GTGGT |
| crLAG3_ | 465 | GCCCAGCCTCTGTGC | 764 | GGGGGCAGGAAGGAGTT |
| 14 | | ATTGGTT | | GTGGT |
| crLAG3_ | 466 | CTTCCTCTTCCTGCC | 765 | ACCCACAGCAATGACGT |
| 15 | | CCAAG | | AGG |
| crLAG3_ | 467 | TGAGCCAGACCATCT | 766 | CAGTGAGGAAAGACCGG |
| 16 | | CCTGA | | GTC |
| crLAG3_ | 468 | CCTTTTGGAGGGCTC | 767 | CCAGAGAGGCTTTCGGG |
| 17 | | AGCGCTG | | GTGGA |
| crLAG3_ | 469 | TGAGCCAGACCATCT | 768 | CAGTGAGGAAAGACCGG |
| 18 | | CCTGA | | GTC |
| crLAG3_ | 470 | TGAGCCAGACCATCT | 769 | CAGTGAGGAAAGACCGG |
| 19 | | CCTGA | | GTC |
| crLAG3_ | 471 | GTCTGGAGCCCCCAA | 770 | CTGGGCCTGGCTCACAT |
| 20 | | CTCCCTT | | CCTCT |
| crLAG3_ | 472 | GTCTGGAGCCCCCAA | 771 | CTGGGCCTGGCTCACAT |
| 21 | | CTCCCTT | | CCTCT |
| crLAG3_ | 473 | GACCCGGTCTTTCCT | 772 | GAGGGCAGCTACTCCTT |
| 22 | | CACTG | | TCC |
| crLAG3_ | 474 | GACCCGGTCTTTCCT | 773 | GAGGGCAGCTACTCCTT |
| 23 | | CACTG | | TCC |
| crLAG3_ | 475 | GACCCGGTCTTTCCT | 774 | GAGGGCAGCTACTCCTT |
| 24 | | CACTG | | TCC |
| crLAG3_ | 476 | TGGCGACTTTACCCT | 775 | CTCTGGAACTTGTGCCC |
| 25 | | TCGAC | | AGT |
| crLAG3_ | 477 | TGGCGACTTTACCCT | 776 | CTCTGGAACTTGTGCCC |
| 26 | | TCGAC | | AGT |
| crLAG3_ | 478 | CCAAGTGAGTGCAGG | 777 | GTGTCCAGAGAGCTCCA |
| 27 | | GTGAT | | CAC |
| crLAG3_ | 479 | CCTTTTGGAGGGCTC | 778 | CCAGAGAGGCTTTCGGG |
| 28 | | AGCGCTG | | GTGGA |
| crLAG3_ | 480 | CCAAGTGAGTGCAGG | 779 | GTGTCCAGAGAGCTCCA |
| 29 | | GTGAT | | CAC |
| crLAG3_ | 481 | CCAAGTGAGTGCAGG | 780 | GTGTCCAGAGAGCTCCA |
| 30 | | GTGAT | | CAC |
| crLAG3_ | 482 | CCAAGTGAGTGCAGG | 781 | GTGTCCAGAGAGCTCCA |
| 31 | | GTGAT | | CAC |
| crLAG3_ | 483 | CCAAGTGAGTGCAGG | 782 | CCAGCCAAGGTCCTGAG |
| 32 | | GTGAT | | AAA |
| crLAG3_ | 484 | TCCTTTGGGTCACCT | 783 | CTGCTCCAAGAAGCCTC |
| 33 | | GGATC | | TCC |
| crLAG3_ | 485 | TCCTTTGGGTCACCT | 784 | CTGCTCCAAGAAGCCTC |
| 34 | | GGATC | | TCC |
| crLAG3_ | 486 | AGAACGCTTTGTGTG | 785 | TTTGGGTCCTGGCATTC |
| 35 | | GAGCT | | TGG |
| crLAG3_ | 487 | TTCCTGCACCCTGTT | 786 | GCAGAAGGCTGAGATCC |
| 36 | | TCTCC | | TGG |
| crLAG3_ | 488 | AGAACGCTTTGTGTG | 787 | TTTGGGTCCTGGCATTC |
| 37 | | GAGCT | | TGG |
| crLAG3_ | 489 | CTGGATCCCTGGGGA | 788 | TGGCGTTTGGGTCCTGG |
| 38 | | AGCTGCT | | CATTC |
| crLAG3_ | 490 | TTTCTCAGGACCTTG | 789 | AAGCCAGAGATCAGGTC |
| 39 | | GCTGG | | CCT |
| crLAG3_ | 491 | CTTTCCCAGCCTTGG | 790 | AAGCCAGAGATCAGGTC |
| 40 | | CAATG | | CCT |
| crLAG3_ | 492 | GCTGAATGACCCTGG | 791 | GGCTCCAGTCACCAAAA |
| 41 | | GACAA | | GGA |
| crLAG3_ | 493 | GCTGAATGACCCTGG | 792 | GGCTCCAGTCACCAAAA |
| 42 | | GACAA | | GGA |
| crLAG3_ | 494 | CCATAGGTGCCCAAC | 793 | TGAGGGCAAGTTCAGGG |
| 43 | | GCTCTGG | | TCCCA |
| crLAG3_ | 495 | CCATAGGTGCCCAAC | 794 | TGAGGGCAAGTTCAGGG |
| 44 | | GCTCTGG | | TCCCA |
| crLAG3_ | 496 | CCATAGGTGCCCAAC | 795 | TGAGGGCAAGTTCAGGG |
| 45 | | TGCTCGG | | TCCCA |
| crLAG3_ | 497 | GGCCTCTCTTTTGCT | 796 | GGTTGAGTGCTGGATTC |
| 46 | | CACCT | | GGA |
| crLAG3_ | 498 | CCATAGGTGCCCAAC | 797 | TGAGGGCAAGTTCAGGG |
| 47 | | GCTCTGG | | TCCCA |
| crLAG3_ | 499 | CCATAGGTGCCCAAC | 798 | TGAGGGCAAGTTCAGGG |
| 48 | | GCTCTGG | | TCCCA |
| crLAG3_ | 500 | CCATAGGTGCCCAAC | 799 | TGAGGGCAAGTTCAGGG |
| 49 | | GCTCTGG | | TCCCA |
| crLAG3_ | 501 | CCATAGGTGCCCAAC | 800 | TGAGGGCAAGTTCAGGG |
| 50 | | GCTCTGG | | TCCCA |
| crLAG3_ | 502 | CATCCTTCTCCTCCT | 801 | GACTGGGCTGCTGAGAT |
| 51 | | TCCGC | | CTG |
| crLAG3_ | 503 | CATCCTTCTCCTCCT | 802 | GACTGGGCTGCTGAGAT |
| 52 | | TCCGC | | CTG |
| crLAG3_ | 504 | CATCCTTCTCCTCCT | 803 | GACTGGGCTGCTGAGAT |
| 53 | | TCCGC | | CTG |
| crLAG3_ | 505 | GACGGTTGGTGGTCA | 804 | CACGCTCAGCACCGTGT |
| 54 | | AGAGA | | A |
| crLAG3_ | 506 | CGCTACACGGTGCTG | 805 | CACATACTCGAGGCCTG |
| 55 | | AGC | | GC |
| crLAG3_ | 507 | CTGAGATGGGGAGAG | 806 | TTCCGGAACCAATGCAC |
| 56 | | GGTGA | | AGA |
| crPDCD1 | 508 | TCTCTCAGACTCCCC | 807 | AGCTTGTCCGTCTGGTT |
| _1 | | AGACAGG | | GCT |
| crPDCD1 | 509 | CTAAGTCCCTGATGA | 808 | AGGAAGGAAGGCACAGT |
| _2 | | AGGCCCC | | GGATC |
| crPDCD1 | 510 | GCTGACTCCCTCTCC | 809 | CGCTAGGAAAGACAATG |
| _3 | | CTTTCTC | | GTGGC |
| crPDCD1 | 511 | TCTCTGTGGACTATG | 810 | CCAAGAGCAGTGTCCAT |
| _4 | | GGGAGCT | | CCTCA |
| crPDCD1 | 512 | CTGCAGCTTCTCCAA | 811 | GAGGTAGGTGCCGCTGT |
| _5 | | CACATCG | | CATT |
| crPDCD1 | 513 | GATGTGGAGGAAGAG | 812 | TACCTAAGAACCATCCT |
| _6 | | GGGGC | | GGCCG |
| crPDCD1 | 514 | CTGCAGCTTCTCCAA | 813 | GAGGTAGGTGCCGCTGT |
| _7 | | CACATCG | | CATT |
| crPDCD1 | 515 | CTGCAGCTTCTCCAA | 814 | GAGGTAGGTGCCGCTGT |
| _8 | | CACATCG | | CATT |
| crPDCD1 | 516 | CTGCAGCTTCTCCAA | 815 | GAGGTAGGTGCCGCTGT |
| _9 | | CACATCG | | CATT |
| crPDCD1 | 517 | CTGCAGCTTCTCCAA | 816 | GAGGTAGGTGCCGCTGT |
| _10 | | CACATCG | | CATT |
| crPDCD1 | 518 | GCGTGACTTCCACAT | 817 | AGCTCCTGATCCTGTGC |
| _11 | | GAGCG | | AG |
| crPDCD1 | 519 | GCGTGACTTCCACAT | 818 | AGCTCCTGATCCTGTGC |
| _12 | | GAGCG | | AG |
| crPDCD1 | 520 | GCGTGACTTCCACAT | 819 | AGCTCCTGATCCTGTGC |
| _13 | | GAGCG | | AG |
| crPDCD1 | 521 | CTCTAGTCTGCCCTC | 820 | GACCCAGACTAGCAGCA |
| _14 | | ACCCCT | | CCAG |
| crPDCD1 | 522 | CTCTAGTCTGCCCTC | 821 | GACCCAGACTAGCAGCA |
| _15 | | ACCCCT | | CCAG |
| crPDCD1 | 523 | GATGTGGAGGAAGAG | 822 | TACCTAAGAACCATCCT |
| _16 | | GGGGC | | GGCCG |
| crPDCD1 | 524 | CTCTAGTCTGCCCTC | 823 | GACCCAGACTAGCAGCA |
| _17 | | ACCCCT | | CCAG |
| crPDCD1 | 525 | CTCTAGTCTGCCCTC | 824 | GACCCAGACTAGCAGCA |
| _18 | | ACCCCT | | CCAG |
| crPDCD1 | 526 | CTCTAGTCTGCCCTC | 825 | GACCCAGACTAGCAGCA |
| _19 | | ACCCCT | | CCAG |
| crPDCD1 | 527 | CAGCTCAGGGTAAGC | 826 | GGTCTTCTCTCGCCACT |
| _20 | | AGCTCAT | | GGAAA |
| crPDCD1 | 528 | CAGCTCAGGGTAAGC | 827 | GGTCTTCTCTCGCCACT |
| _21 | | AGCTCAT | | GGAAA |
| crPDCD1 | 529 | GCTGACTCCCTCTCC | 828 | CGCTAGGAAAGACAATG |
| _22 | | CTTTCTC | | GTGGC |
| crPDCD1 | 530 | TCTCTGTGGACTATG | 829 | CCAAGAGCAGTGTCCAT |
| _23 | | GGGAGCT | | CCTCA |
| crPDCD1 | 531 | GATGTGGAGGAAGAG | 830 | TACCTAAGAACCATCCT |
| _24 | | GGGGC | | GGCCG |
| crPDCD1 | 532 | GCCACCATTGTCTTT | 831 | TTCTCCTGAGGAAATGC |
| _25 | | CCTAGCG | | GCTGA |
| crPDCD1 | 533 | GATGTGGAGGAAGAG | 832 | TACCTAAGAACCATCCT |
| _26 | | GGGGC | | GGCCG |
| crPDCD1 | 534 | TCTCTCAGACTCCCC | 833 | AGCTTGTCCGTCTGGTT |
| _27 | | AGACAGG | | GCT |
| crPDCD1 | 535 | TCTCTCAGACTCCCC | 834 | AGCTTGTCCGTCTGGTT |
| _28 | | AGACAGG | | GCT |
| crPDCD1 | 536 | TCTCTCAGACTCCCC | 835 | AGCTTGTCCGTCTGGTT |
| _29 | | AGACAGG | | GCT |
| crPDCD1 | 537 | TCTCTCAGACTCCCC | 836 | AGCTTGTCCGTCTGGTT |
| _30 | | AGACAGG | | GCT |
| crPTPN1 | 538 | TGGTGTCTGTCTTCT | 837 | TTCTTGTACGAGAGAGC |
| _1 | | GTCAGC | | CAGAG |
| crPTPN1 | 539 | CGAAATGCAGGCAGC | 838 | CACCCAAATATCACTGG |
| _2 | | AAGCTAT | | TGTGGA |
| crPTPN1 | 540 | CTCTGGGAAAGAAGC | 839 | GGTAACATCTTGCCAGA |
| _3 | | AGAGAA | | CCCA |
| CrPTPN1 | 541 | TTCTGTCTACCTCTG | 840 | GAAATACGACGTTGGTG |
| 1_4 | | TATGTTTGC | | GAGGAG |
| crPTPN1 | 542 | CTTGGACTAGGCTGG | 841 | TGGTCAGAAAACACTGT |
| 1_5 | | GGAGTA | | GAAAAG |
| crPTPN1 | 543 | AGGACGTCAGTTTCA | 842 | GATCAGCCCCTTAACAC |
| 1_6 | | AGTCTCTC | | GACTC |
| crPTPN1 | 544 | TCCAAGCATGGTTTT | 843 | GTTGTTGTGGAAAGTAG |
| 1_7 | | ACCACTTC | | TGCTGA |
| crPTPN1 | 545 | CGCACACAATTCTGA | 844 | AGGTACAGAGGTGCTAG |
| 1_8 | | ACATTTCC | | GAATC |
| crPTPN1 | 546 | CCCTTGGAGGAATGT | 845 | GAACAAAATCTCCAGGG |
| 1_9 | | GTCTACTTTT | | TGGCTC |
| crPTPN1 | 547 | G+F96AACAAAATCT | 846 | CCCTTGGAGGAATGTGT |
| 1_10 | | CCAGGGTGGCTC | | CTACTTTT |
| crPTPN6 | 548 | CTCTACTCCTGCACC | 847 | GCGGGTACTTGAGGTGG |
| _1 | | GACTGG | | ATGAT |
| crPTPN6 | 549 | GGGGGATCAGGTGAC | 848 | GGAGCCCTCACCTCTCA |
| _2 | | CCATA | | CTA |
| crPTPN6 | 550 | CCCGATGGATGCCCT | 849 | GAGGGTGGAGACCTGTG |
| _3 | | CTTTG | | AGA |
| crPTPN6 | 551 | GCACAGGCACCATCA | 850 | TGAACTTGTACTGCGCC |
| _4 | | TTGTC | | TCC |
| crPTPN6 | 552 | CGACCCTCCCTTTCC | 851 | AGAACAAGTCCAGGGAG |
| _5 | | AGAAC | | GGA |
| crPTPN6 | 553 | GATGGTGAGGTAAGG | 852 | TACCTGACGGAGAGCGA |
| _6 | | GCCTG | | GAA |
| crPTPN6 | 554 | GGCCCCTCTCTGTGA | 853 | ACTGAGCACAGAAAGCA |
| _7 | | ATGTC | | CGA |
| crPTPN6 | 555 | GTGGCCTGGGTCTTA | 854 | CTGCCTTACCTCGCACA |
| _8 | | CCTTC | | TGA |
| CrPTPN6 | 556 | GTGGCCTGGGTCTTA | 855 | CTGCCTTACCTCGCACA |
| _9 | | CCTTC | | TGA |
| crPTPN6 | 557 | GTGGCCTGGGTCTTA | 856 | CTGCCTTACCTCGCACA |
| _10 | | CCTTC | | TGA |
| crPTPN6 | 558 | GTGGCCTGGGTCTTA | 857 | CTGCCTTACCTCGCACA |
| _11 | | CCTTC | | TGA |
| crPTPN6 | 559 | GTGGCCTGGGTCTTA | 858 | CTGCCTTACCTCGCACA |
| _12 | | CCTTC | | TGA |
| crPTPN6 | 560 | GTGGCCTGGGTCTTA | 859 | CTGCCTTACCTCGCACA |
| _13 | | CCTTC | | TGA |
| crPTPN6 | 561 | CTGGACGTTTCTTGT | 860 | GGTCCCCAGCCTTGAAT |
| _14 | | GCGTG | | TCA |
| crPTPN6 | 562 | CTGGACGTTTCTTGT | 861 | GGTCCCCAGCCTTGAAT |
| _15 | | GCGTG | | TCA |
| crPTPN6 | 563 | GGAGGGTCTGCCTGG | 862 | GTAGACAAAGGCGCCTG |
| _16 | | GCTTGAA | | AGGCC |
| crPTPN6 | 564 | GATGGTGAGGTAAGG | 863 | TACCTGACGGAGAGCGA |
| _17 | | GCCTG | | GAA |
| crPTPN6 | 565 | CTGAGGCTCCTGTCT | 864 | GTAGACAAAGGCGCCTG |
| _18 | | GTGAC | | AGG |
| crPTPN6 | 566 | CTCAAGTCCTGTGAA | 865 | CAGAAGCTCACATCTGG |
| _19 | | TGGCCT | | GGG |
| crPTPN6 | 567 | CTCAAGTCCTGTGAA | 866 | CAGAAGCTCACATCTGG |
| _20 | | TGGCCT | | GGG |
| crPTPN6 | 568 | GACTTCTCGCTCTTC | 867 | GCAAGGAGGGGAAGGTG |
| _21 | | CCCAC | | TC |
| crPTPN6 | 569 | GACTTCTCGCTCTTC | 868 | GCAAGGAGGGGAAGGTG |
| _22 | | CCCAC | | TC |
| crPTPN6 | 570 | GACACCTTCCCCTCC | 869 | CGGTATCCTGGGTGAAT |
| _23 | | TTGC | | GGG |
| crPTPN6 | 571 | CCGATGGATGCCCTC | 870 | GAGGGTGGAGACCTGTG |
| _24 | | TTTGG | | AGA |
| crPTPN6 | 572 | GCTGATGCTCATTTC | 871 | GAGGGTGGAGACCTGTG |
| _25 | | CCCAC | | AGA |
| crPTPN6 | 573 | GATGCTCATTTCCCC | 872 | GAGGGTGGAGACCTGTG |
| _26 | | ACCCA | | AGA |
| crPTPN6 | 574 | CTCTCCGCCCACTCC | 873 | CAGCACAGGCCCTGAAC |
| _27 | | CAGTTGA | | CACTG |
| crPTPN6 | 575 | CTTGCATGGGTGAGG | 874 | ACCCGGCCTTTCTCCAC |
| _28 | | GTGGCAG | | CTCTC |
| crPTPN6 | 576 | GCTCACTGTCTTGGG | 875 | TGCCCTGGCATCTGACT |
| _29 | | GTGCGTC | | GCTCT |
| crPTPN6 | 577 | GCTCACTGTCTTGGG | 876 | TGCCCTGGCATCTGACT |
| _30 | | GTGCGTC | | GCTCT |
| crPTPN6 | 578 | GCTCACTGTCTTGGG | 877 | TGCCCTGGCATCTGACT |
| _31 | | GTGCGTC | | GCTCT |
| crPTPN6 | 579 | CCCATCCGTCCATCC | 878 | TTCGGTTGTGTCATGCT |
| _32 | | AACAA | | CCC |
| crPTPN6 | 580 | CCCATCCGTCCATCC | 879 | TTCGGTTGTGTCATGCT |
| _33 | | AACAA | | CCC |
| crPTPN6 | 581 | CGACCCTCCCTTTCC | 880 | AGAACAAGTCCAGGGAG |
| _34 | | AGAAC | | GGA |
| crPTPN6 | 582 | GGCCCTACTCTGTGA | 881 | GCCAGATCTCCCGAATC |
| _35 | | CCAAC | | AGG |
| crPTPN6 | 583 | CACGGTAGACAGGAG | 882 | GCACAAGAGAGTGGCCA |
| _36 | | GCAAG | | AAA |
| crPTPN6 | 584 | GTCGGGTAGGGTGAG | 883 | ATCATCCTCACCTGCAG |
| _37 | | ATGGA | | TGC |
| crPTPN6 | 585 | CCTGATTCGGGAGAT | 884 | AACAGCTCATGGCACTT |
| _38 | | CTGGC | | AGC |
| crPTPN6 | 586 | CCTGATTCGGGAGAT | 885 | AACAGCTCATGGCACTT |
| _39 | | CTGGC | | AGC |
| crPTPN6 | 587 | CCTGATTCGGGAGAT | 886 | AACAGCTCATGGCACTT |
| _40 | | CTGGC | | AGC |
| crPTPN6 | 588 | GCTTGACTGGCCTCT | 887 | TCAATGTCACAGTCCAG |
| _41 | | GATGG | | GCC |
| crPTPN6 | 589 | GGCCTGGACTGTGAC | 888 | AGAGGGACAGTGGGAAG |
| _42 | | ATTGA | | GTG |
| crPTPN6 | 590 | GGCCTGGACTGTGAC | 889 | AGAGGGACAGTGGGAAG |
| _43 | | ATTGA | | GTG |
| crPTPN6 | 591 | GGCCTGGACTGTGAC | 890 | AGAGGGACAGTGGGAAG |
| _44 | | ATTGA | | GTG |
| crPTPN6 | 592 | CTCTACTCCTGCAC | 891 | GCGGGTACTTGAGGTGG |
| _45 | | CGACTGG | | ATGAT |
| crPTPN6 | 593 | TTCAGGCTTGGTTCT | 892 | CAGGTCAGGAGACAGCA |
| _46 | | CACCC | | CAG |
| crPTPN6 | 594 | GCCTCTGTCCTCTAG | 893 | TGACCGCTGCTTCTTCA |
| _47 | | GAGCT | | CTT |
| crPTPN6 | 595 | GCCTCTGTCCTCTAG | 894 | TGACCGCTGCTTCTTCA |
| _48 | | GAGCT | | CTT |
| crPTPN6 | 596 | CTGTGCTGTCTCCTG | 895 | AAGAGCTGTACCATGGC |
| _49 | | ACCTG | | CAC |
| crPTPN6 | 597 | CTGTGCTGTCTCCTG | 896 | AAGAGCTGTACCATGGC |
| _50 | | ACCTG | | CAC |
| crPTPN6 | 598 | CTGTGCTGTCTCCTG | 897 | AAGAGCTGTACCATGGC |
| _51 | | ACCTG | | CAC |
| crPTPN6 | 599 | ATGGAGGGGAGAAGT | 898 | GGAGGGGATGGAGGGTA |
| _52 | | TTGCG | | GG |
| crPTPN6 | 600 | GGCCCCTCTCTGTGA | 899 | ACTGAGCACAGAAAGCA |
| _53 | | ATGTC | | CGA |
| crTIGIT | 601 | AAGAGGCCACATCTG | 900 | GTGGCATGCTCTTGGAG |
| _1 | | CTTCC | | TCT |
| CrTIGIT | 602 | GGCTCCAGTCCCATG | 901 | TTCTAGTCAACGCGACC |
| _2 | | GTTAC | | ACC |
| CrTIGIT | 603 | ATGTCACCTCTCCTC | 902 | TCTCCCAGTGTACGTCC |
| _3 | | CACCA | | CAT |
| crTIGIT | 604 | CCCAGGACTCACATG | 903 | GAAGGATGGGGAGATGT |
| _4 | | TGCTT | | GCC |
| CrTIGIT | 605 | ATGTCACCTCTCCTC | 904 | TCTCCCAGTGTACGTCC |
| _5 | | CACCA | | CAT |
| crTIGIT | 606 | AAGAGGCCACATCTG | 905 | GTGGCATGCTCTTGGAG |
| _6 | | CTTCC | | TCT |
| CrTIGIT | 607 | ATGTCACCTCTCCTC | 906 | TCTCCCAGTGTACGTCC |
| _7 | | CACCA | | CAT |
| CrTIGIT | 608 | ATGTCACCTCTCCT | 907 | TCTCCCAGTGTACGTCC |
| _8 | | CCACCA | | CAT |
| CrTIGIT | 609 | GGCACATCTCCCCAT | 908 | TGCTGTGCAGTGTTTCA |
| _9 | | CCTTC | | GGA |
| CrTIGIT | 610 | GGCACATCTCCCCAT | 909 | TGCTGTGCAGTGTTTCA |
| _10 | | CCTTC | | GGA |
| crTIGIT | 611 | GGCACATCTCCCCAT | 910 | TGCTGTGCAGTGTTTCA |
| _11 | | CCTTC | | GGA |
| CrTIGIT | 612 | GGCACATCTCCCCAT | 911 | TGCTGTGCAGTGTTTCA |
| _12 | | CCTTC | | GGA |
| CrTIGIT | 613 | GGTTACACAAAGGGC | 912 | GCCGGAGCCATTACCTT |
| _13 | | TTGGC | | TCT |
| CrTIGIT | 614 | GTCCTCCCTCTAGTG | 913 | TCTGGGTCTCTCTCTGG |
| _14 | | GCTGA | | GTG |
| crTIGIT | 615 | GTCCTCCCTCTAGTG | 914 | TCTGGGTCTCTCTCTGG |
| _15 | | GCTGA | | GTG |
| CrTIGIT | 616 | AGCTGTAACGCGGTT | 915 | CCATTCCTCCTGTCCAG |
| _16 | | GAGAA | | CTG |
| crTIGIT | 617 | AGCTGTAACGCGGTT | 916 | CCATTCCTCCTGTCCAG |
| _17 | | GAGAA | | CTG |
| crTIGIT | 618 | AGTTTGCTGGTGTGC | 917 | CATGCAGCTCGGCACAG |
| _18 | | ATGTGTGT | | TCCTC |
| CrTIGIT | 619 | AGTTTGCTGGTGTGC | 918 | CATGCAGCTCGGCACAG |
| _19 | | ATGTGTGT | | TCCTC |
| CrTIGIT | 620 | AGTTTGCTGGTGTGC | 919 | CATGCAGCTCGGCACAG |
| _20 | | ATGTGTGT | | TCCTC |
| crTIGIT | 621 | AGTTTGCTGGTGTGC | 920 | CATGCAGCTCGGCACAG |
| _21 | | ATGTGTGT | | TCCTC |
| crTIGIT | 622 | AGAAGAAAGCCCTCA | 921 | TGCAGTTACCCAGGCTT |
| _22 | | GAATCCA | | CTG |
| crTIGIT | 623 | TGTGGAAGGTGACCT | 922 | AGAAGATGCCTCTGGTT |
| _23 | | CAGGA | | GCT |
| crTIGIT | 624 | GGAGGAGCAACAGGA | 923 | TGGTGGAGGAGAGGTGA |
| _24 | | TGGAC | | CAT |
| CrTIGIT | 625 | GAAGCTGTGTCCAGG | 924 | CGCAGCACTGATGGAGA |
| _25 | | CAGAA | | GTA |
| crTIGIT | 626 | GAAGCTGTGTCCAGG | 925 | CGCAGCACTGATGGAGA |
| _26 | | CAGAA | | GTA |
| crTIGIT | 627 | GGAGGAGCAACAGGA | 926 | TGGTGGAGGAGAGGTGA |
| _27 | | TGGAC | | CAT |
| crTIGIT | 628 | CCCAGGACTCACATG | 927 | GAAGGATGGGGAGATGT |
| _28 | | TGCTT | | GCC |
| crTIGIT | 629 | CCCAGGACTCACATG | 928 | GAAGGATGGGGAGATGT |
| _29 | | TGCTT | | GCC |
| CrTIGIT | 630 | CCCAGGACTCACATG | 929 | GAAGGATGGGGAGATGT |
| _30 | | TGCTT | | GCC |
| crTIGIT | 631 | ATGTCACCTCTCCTC | 930 | TCTCCCAGTGTACGTCC |
| _31 | | CACCA | | CAT |
| crTIM3_ | 632 | GGCCATCCTTGTATC | 931 | GCGGCTACTGCTCATGT |
| 1 | | TCTCCC | | GAT |
| crTIM3_ | 633 | GCACGGAGATATCCA | 932 | GACATTAGCCAAGGTCA |
| 2 | | TGCCT | | Ccc |
| crTIM3_ | 634 | GGCCATCCTTGTATC | 933 | GCGGCTACTGCTCATGT |
| 3 | | TCTCCC | | GAT |
| crTIM3_ | 635 | TGTCTCCACCACTTC | 934 | ACATTAGCCAAGGTCAC |
| 4 | | CCTCT | | CCC |
| crTIM3_ | 636 | GATCCGGCAGCAGTA | 935 | ATGCCTATCTGCCCTGC |
| 5 | | GATCC | | TTC |
| CrTIM3_ | 637 | CCCTTGTCCTCTGTA | 936 | GCGGCTACTGCTCATGT |
| 6 | | CAGCA | | GAT |
| crTIM3_ | 638 | TCTCCTTTGCGGAAA | 937 | ATGCAGGGTCCTCAGAA |
| 7 | | TCCCC | | GTG |
| crTIM3_ | 639 | GATCCGGCAGCAGTA | 938 | ATGCCTATCTGCCCTGC |
| 8 | | GATCC | | TTC |
| crTIM3_ | 640 | GATCCGGCAGCAGTA | 939 | ATGCCTATCTGCCCTGC |
| 9 | | GATCC | | TTC |
| crTIM3_ | 641 | GATCCGGCAGCAGTA | 940 | ATGCCTATCTGCCCTGC |
| 10 | | GATCC | | TTC |
| crTIM3_ | 642 | GATCCGGCAGCAGTA | 941 | ATGCCTATCTGCCCTGC |
| 11 | | GATCC | | TTC |
| crTIM3_ | 643 | GATCCGGCAGCAGTA | 942 | ATGCCTATCTGCCCTGC |
| 12 | | GATCC | | TTC |
| crTIM3_ | 644 | GCAAATGTCCACTCA | 943 | GGAGCCTGTCCTGTGTT |
| 13 | | CCTGG | | TGA |
| crTIM3_ | 645 | GCAAATGTCCACTCA | 944 | GGAGCCTGTCCTGTGTT |
| 14 | | CCTGG | | TGA |
| crTIM3_ | 646 | TCTTAGTGGCCCTCC | 945 | CGCAAAGGAGATGTGTC |
| 15 | | TCCAG | | CCT |
| crTIM3_ | 647 | CCCTTGTCCTCTGTA | 946 | GCGGCTACTGCTCATGT |
| 16 | | CAGCA | | GAT |
| crTIM3_ | 648 | TCTTAGTGGCCCTCC | 947 | CGCAAAGGAGATGTGTC |
| 17 | | TCCAG | | CCT |
| crTIM3_ | 649 | TCTTAGTGGCCCTCC | 948 | CGCAAAGGAGATGTGTC |
| 18 | | TCCAG | | CCT |
| crTIM3_ | 650 | ACTGAGCATCACCAA | 949 | CAGTGGGATCTACTGCT |
| 19 | | TGGGG | | GCC |
| crTIM3_ | 651 | GTCCCCTGGTGGTAA | 950 | ACGTAGGTATCCAGGCA |
| 20 | | GCATC | | GGT |
| crTIM3_ | 652 | GTCCCCTGGTGGTAA | 951 | ACGTAGGTATCCAGGCA |
| 21 | | GCATC | | GGT |
| crTIM3_ | 653 | AAAGATTCCCTCCTC | 952 | AGGTTTGGAAGCTGAGG |
| 22 | | TGCCC | | GTG |
| crTIM3_ | 654 | GCCAGCTAAAGATTC | 953 | CTTGCTGCCCCTTTGAT |
| 23 | | CCTCCT | | TCC |
| crTIM3_ | 655 | GCACGGAGATATCCA | 954 | TGTTTCTGACATTAGCC |
| 24 | | TGCCT | | AAGGT |
| crTIM3_ | 656 | CCCTTGTCCTCTGTA | 955 | GCGGCTACTGCTCATGT |
| 25 | | CAGCA | | GAT |
| crTIM3_ | 657 | TGAGTACAACATAGC | 956 | CGGAGTAGAATTCATTT |
| 26 | | TCACAAA | | CAAATAGG |
| crTIM3_ | 658 | TGAGTACAACATAGC | 957 | CGGAGTAGAATTCATTT |
| 27 | | TCACAAA | | CAAATAGG |
| crTIM3_ | 659 | CAAGGACAAGGTGGG | 958 | TCCTCTCTCTCTCTCTC |
| 28 | | CATGAAG | | TCTCTCT |
| crTIM3_ | 660 | CACAGATCCCTGCTC | 959 | AGGACTCAGCCATCCTG |
| 29 | | CGATG | | TGA |
| crTIM3_ | 661 | CACAGATCCCTGCTC | 960 | AGGACTCAGCCATCCTG |
| 30 | | CGATG | | TGA |
| crTIM3_ | 662 | CGCCGAAGATAAGAG | 961 | CAGCCATCCTGTGATGT |
| 31 | | CCAGA | | TGT |
| crTIM3_ | 663 | GGATTTGGATGGACA | 962 | TGGCCAATGACTTACGG |
| 32 | | AAAGGGT | | GAC |
| crTIM3_ | 664 | GGATTTGGATGGACA | 963 | TGGCCAATGACTTACGG |
| 33 | | AAAGGGT | | GAC |
| crTIM3_ | 665 | CAAAGCCCCAGGACA | 964 | GCGTGCTTCCAGTGAAC |
| 34 | | GGATT | | CTA |
| crTIM3_ | 666 | CAAAGCCCCAGGACA | 965 | GCGTGCTTCCAGTGAAC |
| 35 | | GGATT | | CTA |
| crTIM3_ | 667 | CCCTTGTCCTCTGTA | 966 | GCGGCTACTGCTCATGT |
| 36 | | CAGCA | | GAT |
| crTIM3_ | 668 | CAAAGCCCCAGGACA | 967 | GCGTGCTTCCAGTGAAC |
| 37 | | GGATT | | CTA |
| crTIM3_ | 669 | CAAAGCCCCAGGACA | 968 | GCGTGCTTCCAGTGAAC |
| 38 | | GGATT | | CTA |
| crTIM3_ | 670 | CAAAGCCCCAGGACA | 969 | GCGTGCTTCCAGTGAAC |
| 39 | | GGATT | | CTA |
| crTIM3_ | 671 | CATTGGGCTCCTCCA | 970 | GCTGTCTCTTTGGGAAA |
| 40 | | CTTCA | | GCC |
| crTIM3_ | 672 | CATTGGGCTCCTCCA | 971 | GCTGTCTCTTTGGGAAA |
| 41 | | CTTCA | | GCC |
| crTIM3_ | 673 | CATTGGGCTCCTCCA | 972 | GCTGTCTCTTTGGGAAA |
| 42 | | CTTCA | | GCC |
| crTIM3_ | 674 | CATTGCAAAGCGACA | 973 | CCGTGTTACCTGGGAAA |
| 43 | | ACCCA | | TGC |
| crTIM3_ | 675 | CATTGCAAAGCGACA | 974 | CCGTGTTACCTGGGAAA |
| 44 | | ACCCA | | TGC |
| crTIM3_ | 676 | CATTGCAAAGCGACA | 975 | CCGTGTTACCTGGGAAA |
| 45 | | ACCCA | | TGC |
| crTIM3_ | 677 | CATTGCAAAGCGACA | 976 | CCGTGTTACCTGGGAAA |
| 46 | | ACCCA | | TGC |
| crTIM3_ | 678 | CAGTGCAGGTCCCAG | 977 | AGTGGAGGAGCCCAATG |
| 47 | | TTCAA | | AGT |
| crTIM3_ | 679 | CAGTGCAGGTCCCAG | 978 | AGTGGAGGAGCCCAATG |
| 48 | | TTCAA | | AGT |
| crTIM3_ | 680 | TCAAACACAGGACAG | 979 | AACAGGACTGCAGCAGT |
| 49 | | GCTCC | | AGC |
| crTIM3_ | 681 | TCTCCTTTGCGGAAA | 980 | ATGCAGGGTCCTCAGAA |
| 50 | | TCCCC | | GTG |
| crTIM3_ | 682 | TCTCCTTTGCGGAAA | 981 | ATGCAGGGTCCTCAGAA |
| 51 | | TCCCC | | GTG |
| crAAVS1 | 683 | CATCTCTCCTCCCTC | 982 | AAGAGGATGGAGAGGTG |
| | | ACCCA | | GCT |

### Example 12: NGS Data Analysis

[0433] Initial quality assessment of the obtained reads was performed with FastQC36. The sequencing data were aligned and analyzed with the CRISPResso2 software, using CRISPRessoBatch command with the parameters—cleavage_offset 1—quantification_window_size 10—quantification_window_center 1—expand_ambiguous_alignments for the INDEL frequency analysis. For the ORF disruption analysis, CRISPRessoBatch command with the parameters—cleavage_offset 1—coding_seq <EXON_SEQ>—quantification_window_size 0—quantification_window_center 1—expand_ambiguous_alignments was used. Modification rates from the CRISPResso2 software output were analyzed in Excel.

### Example 13: CRISPR-MAD7 Platform for Human Genome Editing Using the Jurkat T-Cell Leukemia Cell Line

[0434] MAD7 nuclease comprising a His6 tag and either one (MAD7-INLS) or four (MAD7-4NLS) nuclear localization signals (NLS) were used (FIG. 5). RNPs were generated as described in Example 5. Editing frequency of the MAD7 nuclease complexed with one or more guide nucleic acids comprising a spacer sequence of SEQ ID NOs: 86-384 as shown in Table 5 was determined by nucleofection of RNPs in Jurkat T-cells using the Lonza recommended nucleofection program SE-CL-120 (Example 7), followed by genomic DNA extraction (Example 10), amplification of the edited locus and targeted next-generation sequencing (Example 11) for identification of the edits, and finally by computational analysis (Example 12) of modification frequency using the CRISPResso2 algorithm.

[0435] Firstly, using a gNA targeting the DNMT1 locus, the editing frequency of MAD7 comprising either one or four NLS complexed with the respective gNA was compared. RNP concentration-dependent modification efficiency was observed as evidenced by an increased fraction of modified amplicons (FIG. 5, left axis, dark grey for MAD7-INLS and light grey representing MAD7-4NLS). Error bars represent one standard deviation for a sample of 3 (n=3). In this experiment, editing frequency was enhanced in Jurkat cells when treated with RNPs comprising MAD-4NLS, which indicates that optimization of the NLS can improve editing efficiency. A slight decrease in cell viability was seen at higher concentrations of RNP for those comprising four NLS as compared to one NLS (FIG. 5, right axis). Specifically, FIG. 5 shows editing frequency at the DNMT1 locus (n=3; Mean±SD) and cell viability of T-cell leukemic cells as a function of MAD7 comprising one or four nuclear localization signal (NLS) and MAD7-RNP amounts (pmol: constant ratio of 1:1.5 MAD7: gNA). Dark grey bars and circles represent mean modification frequency and viability using MAD7-INLS, respectively. Light grey bars and triangles represent mean modification frequency and viability using MAD7-4NLS, respectively.

[0436] To optimize editing activity, 93 different transfection conditions were tested: 31 nucleofection programs in combination with three buffers-on the Lonza Nucleofector 96-well Shuttle System (FIGS. 6-8). FIGS. 6, 7, and 8 show the editing frequency (bars: x-axis) of each of the electroporation conditions (buffers SE, SF, and SG respectively) as compared to a control (y-axis, control at the top). The majority of buffer-program transfection combinations resulted in suboptimal viability (dots: x-axis) and editing frequency, however, the analysis revealed several conditions that supported substantial rates of both cell viability and editing. Two improved conditions observed in the screen, namely SF-CA-137 and SG-CA-138, were then validated and compared to the Lonza recommended nucleofection programs for T-cell leukemia, namely SE-CL-120 and SE-CK-116 (FIG. 9). Specifically. FIG. 9 shows editing frequency at the DNMT1 locus (n=4; Mean±SD) in T-cell leukemic cell line achieved by utilization of the transfection conditions identified in FIG. 5 (100 pmol MAD7-4NLS) and Lonza recommended nucleofection programs SE-CK-116 and SE-CL-120, as well as the two best nucleofection programs observed in this study. SF-CA-137 and SG-CA-138 (FIGS. 6-8). Dark grey bars represent mean modification frequency using crDNMT1. Light grey bars represent mean modification frequency using crIDTneg (Integrated DNA Technologies, IDT).

### Example 14: Scalable High-Level MAD7-RNP Editing of Immunologically Relevant Genes in Jurkat T-Cell Leukemia Cell Line

[0437] The Jurkat T-cell leukemia cell line was used as a model system to screen GNAs demonstrating high editing efficiency. The screen included 298 unique gNAs comprising one or more spacer sequences of SEQ ID NOs: 86-384 of Table 5 targeting the immune checkpoint receptors PDCD1, TIM3, LAG3, TIG1T, and CTLA4, the checkpoint phosphatases PTPN6 (SHP-1) and PTPN11 (SHP-2), and the TCR signaling subunit CD247 (CD35). RNPs were generated as described in Example 5, nucleofected (Example 7), genomic DNA was extracted (Example 10), the edited loci amplified and sequenced (Example 11), and the sequencing data computationally analyzed (Example 12) using the CRISPResso2 algorithm.

[0438] CRISPResso2 software reports the frequency of modifications (insertions, deletions, and substitutions) within a quantification window flanking the position of MAD7-induced cleavage in the amplicon sequence. To better understand detection of editing events, the type of modifications detected in 230 amplicons that were sequenced in both gNA-treated and MOCK samples (no MAD7) were compared. Relatively high modification frequencies (median 1%) in MOCK reactions were observed as a result of high frequency of substitutions (FIG. 10, light grey bars): substitutions were detected at a median frequency of 0.96%, likely due to the errors in NGS base calling or substitutions arising during DNA amplification, while insertions and deletions were found at a much lower median frequency of 0.003% and 0.042%, respectively. Specifically. FIG. 10 shows editing frequency at eight different loci using 298 gNAs (n=3; Mean±SD) in T-cell leukemic cell line as a function of various editing types: all modifications.

[0439] only insertions, only deletions, only substitutions, or insertions and deletions (INDELs). Edits were achieved using the transfection conditions identified in Example 13. FIG. 5 (100 pmol MAD7-4NLS) and one of the tested Lonza nucleofection programs (FIG. 9: SF-CA-137). Dark grey boxplots represent mean modification frequency using gNAs. Light grey boxplots represent mean modification frequency using crIDTneg (IDT). Thus, the frequency of both insertions and deletions (INDEL) were used as a means to quantify the editing activity of the CRISPR-MAD7 system to minimize low end noise. Moreover, low INDEL frequencies in MOCK reactions enabled sensitive detection of editing events at a significantly greater fraction of sites (Fisher exact test, P=3×10⁻¹²: FIG. 11). Analysis of gNAs with low INDEL frequencies showed statistically significant editing in gNA-treated samples compared to MOCK samples at INDEL frequencies as low as 0.5% (Fisher exact test, P=4×10⁻⁸: FIG. 11). This indicates the sensitivity of the assay to detect modifications in the sub-1% range. Specifically, FIG. 11 shows INDEL frequency at eight different loci using 298 gNAs (n=3; Mean±SD) in T-cell leukemic cell line as a function of two modification types: all modifications <1%, and INDELs <1%, or <0.5%, or <0.1%, with lower INDEL frequencies in MOCK compared to gNA reactions at INDELs <1% (Fisher's exact test: P=3×10⁻¹²) and <0.5% (Fisher exact test, P=4×10⁻⁸). Dark grey boxplots represent mean INDEL frequency using gNAs. Light grey boxplots represent mean INDEL frequency using crIDTneg (IDT).

[0440] Since MAD7 can target a wide range of PAM, gNAs adjacent to all YTTN PAM variants were screened and editing specificity of MAD7 in Jurkat cells was analyzed. MAD7 demonstrated editing with all eight combinations of YTTN PAM: in this experiment, editing was higher at the YTTV and TTTV consensus sequences (Fisher exact test: P=2×10⁻³ and P=2×10⁻⁴, respectively). While the majority of highly-active (>50% INDEL frequency) gNAs were found at sites with YTTV and TTTV PAMs, moderately-active (>10% INDEL frequency) gNAs were found to target every PAM sequence with the exception of CTTT. This indicates that MAD7 can edit a wide range of target PAMs, albeit at reduced frequencies (FIG. 12). Specifically, FIG. 12 shows INDEL frequency at eight different loci using 298 gNAs (n=3; Mean±SD) in T-cell leukemic cell line as a function of eight YTTN PAM combinations, and TTTV, YTTN, and YTTV PAM motifs. A grey zone on the plot represents moderately-active gNAs (10-50% INDELs), the zone above highly-active gNAs (>50% INDELs), and the zone below active gNAs (1-10% INDELs). INDEL frequency at the YTTV and TTTV PAM motif is significantly higher compared to YTTN motif (Fisher exact test, P=2×10⁻³ and P=2×10⁻⁴, respectively).

[0441] Given the large number of gNAs analyzed, it was determined if the targeted DNA sequence biases editing efficiency. Sequence logos were made to compare the DNA-complementary gNA sequences of inactive (<1% INDELs), active (1-10% INDELs), moderately-active (10-50% INDELs), and highly-active (>50% INDELs) gNAs (FIG. 13A). While there were no strong biases for ribonucleotides at specific positions were identified in this experiment, guanine appeared overrepresented and uracil underrepresented on moderately-active and highly-active gNAs. Next, the frequency of ribonucleotide bases were analyzed within the same four classes of gNAs (FIG. 13B). The analysis confirmed significant enrichment of guanine and depletion of uracil on highly-active gNAs. Specifically, FIG. 13 shows (A) sequence logos comparing DNA-complementary gNA sequences of highly-active (>50% INDELs), moderately-active (10-50% INDELs), active (1-10% INDELs), and inactive (<1% INDELs) gNAs show no strong biases for ribonucleotides at specific positions, however, guanine appeared overrepresented and uracil underrepresented on highly-active and moderately-active gNAs: (B) nucleotide frequency on inactive (<1% INDELs: dark grey box), active (1-10% INDELs: medium grey box), moderately-active (10-50% INDELs: light grey box), and highly-active (>50% INDELs; white box) gNAs, with significant enrichment of guanine and depletion of uracil on highly-active gNAs compared to inactive gNAs (Fisher exact test, P=4×10⁻³ and P=3×10⁻⁴, respectively). Also, significant enrichment of guanine-cytosine content and depletion of adenine-uracil content was observed on moderately-active gNAs compared to inactive gNAs (Fisher exact test, P=1×10⁻²). Moreover, the data showed that nearly 40% of inactive gNAs had runs of three or more adenine or uracil ribonucleotides, while none of the highly-active and <20% of moderately-active gNAs contained such runs (FIG. 14). These sequence features can act as an algorithm for selecting putative high-activity gNAs during initial rounds of screening, and could reduce the overall cost of identifying gNAs for various genes of interest. Specifically. FIG. 14 shows fraction of gNAs with AAA and/or UUU runs as a function of INDEL frequency of highly-active (>50% INDELs), moderately-active (10-50% INDELs), active (1-10% INDELs), and inactive (<1% INDELs) gNAs. Fraction of inactive (<1% INDELs) and active (1-10% INDELs) gNAs containing such runs is higher compared to highly-active (>50% INDELs) gNAs (Fisher exact test, P=1×10⁻³ and P=4×10⁻⁴, respectively).

### Example 15: Validation of gNAs for Gene Editing and Disruption of Immunologically Relevant Genes Using T-Cell Leukemia Cell Line

[0442] High-efficiency gNAs identified in our initial analysis were validated by assaying INDEL frequency for the top three or five gNAs for each of the selected immunologically relevant genes (FIG. 15). Specifically, FIG. 15 shows INDEL (dark grey bars) and frameshift (light grey bars) frequencies (n=3; Mean±SD) in T-cell leukemic cell line as a function of 38 high-efficiency gNAs. Alternating grey and white zones on the plot represent groups of three to five high-efficiency gNAs per locus. In the validation experiment, the INDEL frequency was significantly correlated to the measurements from the initial screen, highlighting the reproducibility of the INDEL assay (FIG. 16). Specifically, FIG. 16 shows correlation of INDEL frequency in the gNA validation experiment versus INDEL formation in the gNA screen experiment (Spearman's correlation=0.91: P=9×10⁻¹⁴), highlighting reproducibility of the INDEL assay. Using the CRISPresso2 software, the degree of open reading frame (ORF) disruption for each of the validated gNAs was estimated (FIG. 15). In addition, for four high-efficiency gNAs targeting three different exons at the PDCD1 locus, surface expression of the PDCD1 protein was measured by flow cytometry 4, 7, and 11 days post-transfection (data not shown). The data revealed that the protein surface expression after transfection with crPDCD1_2, a gNA targeting the PDCD1 gene at the extracellular domain of the protein, was as low as 10% 4 days post-transfection and remained at this level even at day 11 post-transfection. The surface expression after transfection with the remaining three gNAs was significantly higher, 35% and 85% after transfection with crPDCD1_3 and both crPDCD1_4 and crPDCD1_5, respectively.

[0443] This is in line with the ORF data analysis, which showed that for most of the gNAs including the high-efficiency crPDCD1s, the predicted number of INDELs leading to frameshifts was similar to that expected from an unbiased DNA repair process, with frameshifts in two-thirds of the edited loci (FIG. 17). However, several of the gNAs had a markedly different degree of ORF disruption: crCD247_4 resulted in frameshifts with 97% frequency, while crTIM3_1 and crTIM3_3 resulted in frameshifts with 23% and 44% frequency, respectively (FIG. 17). Specifically, FIG. 17 shows fraction of frameshift to INDEL frequency (dark grey bars) in T-cell leukemic cell line as a function of 38 high-efficiency gNAs. Average fraction of INDELs leading to frameshifts (dashed line) is approx. 66%. Alternating grey and white zones on the plot represent groups of three to five high-efficiency gNAs per locus. The analysis of repair products indicates that in the case of crTIM3_1, and to some extent crTIM3_3, the bias arose from directly repeated sequences at the DNA cleavage site, which possibly promoted microhomology-mediated end joining (MMEJ) repair following DNA cleavage. These data help inform selection of gNAs for gene KO since some gNAs, such as crTIM3_1, have much lower frequency of gene disruption than would be predicted based on the frequency of INDEL formation.

[0444] Another consideration for selecting gNAs is the potential for off-target cleavage events. The list of validated gNAs was analyzed using the CasOFFinder software to predict potential off-target editing sites in the genome with up to four mismatches between the gNA and the target DNA sequence. Using the Bioconductor R packages, the predicted off-target sites were matched with the human gene database, and those sites that targeted exons and introns within the genes were extracted. Afterwards, the degree of editing activity at these sites was examined by targeted next-generation sequencing, more specifically, at 25 predicted off-target sites for the top-two PDCD1 gNAs, i.e., crPDCD1_1 and crPDCD1_2. The analysis revealed low-level off-target activity at crPDCD1_2_13 and crPDCD1_2_15 sites, however, INDEL formation at these two sites was statistically insignificant compared to MOCK samples (non-targeting gNAs) (Pairwise T-test, P>0.05; FIGS. 18 and 19). INDEL frequency at 43 putative off-target sites with up to three mismatches between gNA and target DNA sequence were assayed for the top-two gNAs targeting seven remaining genes (i.e., TIM3, LAG3, TIG1T, CTLA4, PTPN6, PTPN11, and CD247; spacer sequences in Table 5). The analysis revealed no detectable activity at any of the putative off-target sites (FIGS. 18 and 19), which confirms the high cleavage fidelity of MAD7-gNA complexes. Specifically. FIGS. 18-19 show INDEL frequency of MAD7 (n=3; Mean±SD) in T-cell leukemic cell line at predicted off-target sites analyzed by targeted deep sequencing. For crPDCD1. INDEL frequency was analyzed at the putative off-target editing sites with ≤4 mismatches between the gNA and target DNA sequence, and with ≤3 mismatches on the remaining gNAs. PAM sequences and spacer sequences with mismatches marked in red are displayed next to their respective measured INDEL frequencies. No significant INDEL frequency at any of the off-target sites was detected (Pairwise T-test, P>0.05).

### Example 16: Transgene Insertion in T-Cell Leukemia Cell Line and Primary T-Cells with CRISPR-MAD7 Platform

[0445] Insertion of exogenous transgenes is an important aspect of mammalian cell engineering. Gene insertion with CRISPR-Cas is achieved by homology-directed repair of CRISPR-induced DNA breaks using HDR-donor templates to copy exogenous genetic sequences into targeted DNA loci. Several studies indicate that HDR templates, composed of linear double stranded DNA, provide the most robust and efficient method of transgene insertion using CRISPR-Cas genome editing systems.

[0446] The Jurkat T-cell leukemia cell line was used to evaluate the transgene insertion and expression efficiency using CRISPR-MAD7 RNP complexes. A highly active gNA targeting the AAVSI (spacer sequence in Table 5) safe-harbor locus (FIG. 20) was used in combination with eight different HDR-repair templates flanked with symmetric homology arms (HA) of 500 base pairs (bp) in the amount of 0.5 μg μL⁻¹. Specifically. FIG. 20 shows INDEL frequency at the AAVS1 locus (n=3; Mean±SD) in T-cell leukemic cell line as a function of MAD7-RNP amounts (pmol: constant ratio of 1:1.5 MAD7: gNA). Dark grey bars represent mean INDEL frequency using crAAVS1. Light grey bars represent mean modification frequency using crIDTneg (IDT). The HDR inserts comprised eight promoters (Table 4) differing in both size and promoter strength to drive GFP expression (FIG. 21). When the transient GFP expression diminished at day 14 post-transfection, comparable insertion efficiencies were observed with stable GFP expressions of up to 30% using four (JET, PGK, EF1a, and CAG) out of eight promoters (FIG. 21), suggesting that the insert size has not affected the integration efficiency at AAVSI in human T-cell leukemia cell line. Specifically. FIG. 21 shows GFP insertion efficiency at AAVSI (n=3; Mean±SD) and cell viability of T-cell leukemic cell line measured at day 14 post-transfection. HDR templates consisting of eight different promoters and flanked with symmetric homology arms of 500 base pairs in the amount of 0.5 μg μL⁻¹ were used. Size of promoters in base pairs: CMV, 1400; SCP, 970; CMVe-SCP, 1270; CMVmax, 1830; JET. 1100; CAG, 2600; PGK, 1410; EF-1a, 2090. Dark grey bars and circles present mean insertion frequency and cell viability using crAAVS1. Light grey bars represent mean insertion frequency and cell viability using crIDTneg (IDT).

[0447] Subsequently, keeping the MAD7-RNP amounts constant, the effect of various homology arm lengths (100 vs 500 bp) and HDR template amounts (0.125 μg μL⁻¹, 0.25 μg μL⁻¹, 0.5 μg μL⁻¹, and 1 μg μL⁻¹) on the insertion efficiency was evaluated using JET and EF1a promoters. Up to 30% higher integration efficiency was observed with HDR templates flanked with HA of 500 compared to 100 base pairs. Moreover, the data showed improved insertion efficiencies with increasing amounts of HDR templates flanked with either 100 or 500 base pair HA but at the same time somewhat reduced cell viability (FIG. 22). Specifically. FIG. 22 shows GFP insertion efficiency at AAVS1 (n=3; Mean±SD) in T-cell leukemic cell line measured at days 2. 7. 14, and 21 post-transfection as a function of donor template amount. No transient GFP expression was observed at day 21 post-transfection. Cell viability (black circles) was measured at day 2 post-transfection. Top panels display GFP insertion efficiencies using donor template flanked with short homology arms (100 bp HA), and bottom panels donor template flanked with long homology arms (500 bp HA). Left panels display GFP insertion efficiencies using donor template containing EF-1a promoter (long, ˜2000 bp), and right panels donor template containing JET promoter (short. ˜1000 bp). Amount of donor template, represented by the gradient above the bars, increases from 0.125, 0.25, 0.5 to 1 μg μL⁻¹. Dark grey bars represent mean insertion frequency using crAAVS1. Light grey bars represent mean insertion frequency using crIDTneg (IDT).

[0448] Next, using primary T-cells isolated from the human peripheral blood from three donors and a protocol selected from the experiments above, i.e., 150:100 pmol gNA: MAD7 RNP complex together with 1 μg μL⁻¹ HDR template, in combination with 100 μg μL⁻¹ poly-L-glutamic acid (PGA), integration efficiency of a clinically relevant CAR transgene containing JET or EF1a promoter flanked with HA of 100 or 500 base pairs and a bovine growth hormone derived polyadenylation sequence was analyzed. An anti-CD19 CAR with fully human variable regions (Hu19CAR), CD8a hinge and transmembrane domains, a CD28 costimulatory domain, and CD35 activation domain was used. Moderate insertion efficiency at AAVS1 but stable CAR expression of up to 14% and 16% was observed using HDR templates flanked with 100 and 500 base pair HA, respectively. The normalized cell viability measured 24 h post-transfection was in same cases relatively low, ranging from 22% with JET-500-CAR, 35% with JET-100-CAR, 43% with EF1a-100-CAR, to 55% with EF1a-500-CAR (FIG. 23). It is important to emphasize, that both CAR insertion efficiency and cell viability were higher in the treatment with PGA compared to the treatment without PGA (P≤0.05; data not shown). Specifically, FIG. 23 shows CAR insertion efficiency at AAVS1 (D=3; n=3; Mean±SD) in primary Pan T-cells measured at days 7 and 11 post-transfection. Cell viability was measured 24 hours post-transfection. Individual panels display CAR insertion efficiencies using donor template structure as described in FIG. 22. Amount of donor template, MAD7-RNP, and PGA was 1 μg μL⁻¹, 100:150 pmol MAD7: gNA, and 100 μg μL⁻¹, in that order. Nucleofection program P3-EH-115 for transfection of primary T-cells was used. D represents number of biological replicas, and n number of technical replicas per D. Dark grey bars represent mean insertion frequency using crAAVS1. Light grey bars represent mean insertion frequency using crIDTneg (IDT).

[0449] Multiple parameters were reevaluated to further optimize primary T-cell viability and CAR insertion efficiencies at AAVS1. Using Pan T-cells isolated from the blood from two donors, the effect of RNP amount with 100 μg μL⁻¹ PGA and EF1a-500-CAR template amount on CAR insertion efficiency and cell viability was tested (data not shown). Reducing the RNP amount to 75:50 pmol gNA: MAD7 RNP complex while increasing the donor template amount to 1.5 μg μL⁻¹ led to improved CAR insertion efficiencies without significantly affecting cell viability (P≥0.05; data not shown). In addition, using the abovementioned transfection conditions in combination with the cell recovery in a post-transfection cultivation medium pretreated with 2 μM M3814 resulted in nearly 5-times more efficient CAR insertion than other experiments (FIG. 24). The optimized CRISPR-MAD7 transfection protocol resulted in CAR insertion efficiency of up to 85% 13-days post-transfection (median 65%) together with the median normalized cell viability as high as 62% 24 hours post-transfection. Specifically, FIG. 24 shows CAR insertion efficiency at AAVS1 (D=5; n=3) in primary Pan T-cells measured at day 7 post-transfection, and re-measured in two biological replicas at day 13 post-transfection (D=2; n=3). Cell viability was measured 24 hours post-transfection (D=5; n=3; Mean±SD). Amount or concentration of donor template, MAD7-RNP, PGA, and M3814 was 1.5 μg μL⁻¹, 50:75 pmol MAD7: gNA, 100 μg μL⁻¹, and 2 μM, respectively. Nucleofection program P3-EH-115 for transfection of primary T-cells was used. D represents number of biological replicas, and n number of technical replicas per D. Dark grey bars represent mean insertion frequency using crAAVS1. Light grey bars represent mean insertion frequency using crIDTneg (IDT).

### Example 17

[0450] gRNAs were designed on Benchling using the standard CRISPR tool. All synthetic As. Cas12a gRNAs were ordered from IDT. The synthetic gRNAs were ordered in two different configurations: regular and dual gRNA design. The regular gRNA design was used for the selection of top gRNAs, and the top gRNAs were tested in the regular and dual gRNA design. dual gRNAs consisted of two parts instead of one: the modulator (crRNA) and the targeter (including spacer sequence) part.

[0451] Jurkat cells were used for tiling experiments, and for optimization and verification of the top gRNAs. The cells were maintained by splitting every 2-3 days. Briefly, materials were sterilized before use in a Biosafety Cabinet Class II (BSC): 15 mL and 50 ml conical tubes, serological pipettes, pipet filler/Pipetboy, RPMI media, FBS, culture flask, pipette tips. Culture media RPMI with 10% FBS was prepared in the BSC and pre-warmed to 37° C., in a water/armor beads bath. In the BSC, 9 mL of pre-warmed cell culture media was added to a 15 mL conic tube. A Styrofoam box was filled with dry ice and the frozen vial(s) of Jurkat cells were removed from from liquid N₂ storage and placed in dry ice. The vials were then placed in a 37° C., water bath to thaw, while avoiding water from contacting the screw cap. Once the cells were thawed, the vial was sprayed with 70% ethanol and brought into the BSC. Note: Work fast because DMSO is toxic to the cells at room temperature. A 1 mL micropipet and tips were used to transfer the whole contents in the cryovial (1 mL) into the falcon tube containing 9 mL of media in a drop-wise manner, then centrifuged at 300×g for 5 min at RT. The supernatant was discarded and the pellet resuspended in 5 ml cell culture media. The viable cell density (cells/ml) and viability (%) was determined using the NucleocounterTM NC202 according to the owner's manual. The cell culture volume was adjusted so that the cell density was 2E5 cells/mL. Cultures were mainted at 2E5 cells/ml and counted every 2-3 days (e.g., Monday-Wednesday-Friday-Monday) An aliquot was transferred to a new flask and dilute with pre-warmed full media (RPMI+10% FBS) to 2E5 cells/ml. On the day before transfection cells were seeded to 1E5 cells/mL.

[0452] T-cells were isolated to form buffy coats and nucleofected after two days. The buffy coats were procured from the Rigshospitalet in Copenhagen, Denmark. The Pan-T cells were enriched by negative selection using an Easy Sep Human T-cell Isolation Kit from StemCell Technologies. The RNPs were formed by mixing gRNAs with Art-Mad7mam+ prior to nucleofection with Jurkat or T-cells. In some cases, synthetic ssODNs (Table 11) with a length of 200 nt were included in the transfections to evaluate impact on frame shift mutation rates by HDR rather than relying on NHEJ alone in an effort to maximize functional disruption. The ssODNs were designed to comprise a deletion of the spacer and PAM sequence thereby resulting in a programmed frame shift. After transfection, the cells were cultivated and assayed for the different readouts. The nucleofection with dual gRNAs followed a similar protocol, but with minor differences in pre-assembling of the gRNAs. Briefly, the two dual RNAs (modulator and targeter) are combined in a molecular ratio of 1:1 (400 μM Modulator

(5′/AltR1/UAAUUUCUACUC 3′) + 400 uM Targeter
(Targeter_CSF2_007: 5′
UUGUAGAUCACAGGAGCCGACCUGCCUAC/AltR2/3′;
Targeter_TRBC1_2_003: 5′
UUGUAGAUAGCCAUCAGAAGCAGAGAUCU/AltR2/3′;
Targeter_CD3E_24: 5′
UUGUAGAUAGAUCCAGGAUACUGAGGGCA/AltR2/3′;
Targeter_CD40LG_40: 5′
UUGUAGAU CUGCUGGCCUCACUUAUGACA/AltR2/ 3′))
at RT for 15 min.

[0453] Cell viability was measured by two different methods depending on the sample number to be measured. For 1-10 samples, the nucleocounter was used. The measurement of the Nuclecounter Via2 cassette is based on Acridine Orange and DAPI staining of the cells whereby Acridine Orange and DAPI double positive cells were counted as dead cells and Acridine orange positive/DAPI negative cells were counted as viable cells. High-throughput microscopy using the Image Xpress pico device (IXP assay) was used when more than 10 samples were measured in 96-well plate format. The measurement of the IXP assay is based on Hoechst and Propidium iodide staining whereby Hoechst stains all cells and Propidium iodide the dead cell population. The assay was performed in 96-well plates and analyzed with the Image Xpress pico high-throughput microscope.

[0454] At the genome level, Amplicon-NGS was used to determine the type and mutation frequency at the on-target site. The Amplicon-NGS assay is based on the amplification of the on-target site using specific primer pairs. The primers are designed to have the predicted cutting site at the center and a length of 180-280 nt. The amplicons are indexed for NGS and sequenced on an Illumina MiSeq system. The analysis was performed using the Crispresso script. Crispresso requires the input of a configuration file comprised of the specific gRNA sequence, primer sequences and the theoretical amplicon that is based on the alignment of the primer pair to the reference human genome GRCh38. In addition, for HDR analysis associated with ssODN-programmable editing a reference sequence with the specific mutations can be input into the configuration file. Crispresso aligns the sequencing reads to the reference amplicon and analyzes the mutation type and frequency −/+10 nt at the putative cut site of Art-Mad7mam+ based on the provided gRNA sequence. As output, Crispresso delivers different mutation types and their frequencies: Substitutions, INDELs, HDR Unmodified, HDR INDELs, HDR+substitutions.

[0455] Protein expression for targeted genes was measured by antibody staining against the target protein to quantify functional disruption of the target gene. The efficiency of functional disruption was verified by antibody staining and quantified as the negative cell population by flow cytometry. TRBC, CD3E and CD40LG are located at the cell surface and living cells were stained with the corresponding antibodies. Since CSF2 is a secreted protein, cells were first activated, secretion was blocked, cells were fixed with formaldehyde, and permeabilized before the staining procedure. Given CD40LG and CSF2 are expressed upon stimulation of primary T-cells, cells were activated first to enhance their expression. The induction of CD40LG and CSF2 was achieved using anti-CD3/CD28 and PMA/Ionomycin, respectively.

[0456] Predicted off-target sites were identified using the online tool CCTop. The putative off-target sites were ranked based on the following criteria: 1) similarity to the MAD7 PAM sequence: 2) the number of mismatches in the spacer sequence: 3) location in the genome (exon, intron or intergenic). The identified putative off-target sites were next evaluated to determine actual in-cell editing using rhAMP-seq, a similar approach to Amplicon-NGS. rhAMP-seq technology uses multiplex PCR to amplify the different genomic sites (producing amplicons) in combination with NGS. The sequencing reads were analyzed using Crispresso as described for above in the Amplicon-NGS section.

[0457] The cutting efficiency was calculated as the percentage of reads with any NHEJ modification (including insertions, deletions, and/or substitutions) of the total number of reads that were aligned to the reference amplicon. Editing with the 176 gRNAs results in a wide range of efficiencies (0 to 90%) for the five targets. Summary of results are shown in Table 13.

[0458] TRBC1 and TRBC 2. It is known that TCR beta is encoded by two genes, TRBC1 and TRBC2. Fortunately, the sequences for TRBC1 and TRBC2 exon I were nearly identical enabling the design of four gRNAs with identical spacer and PAM sequence that target both genes simultaneously (FIG. 28A). Specifically, FIG. 28A shows a schematic overview of the protein coding exons of TRBC1 and TRBC2 and the location of the designed gRNAs (black arrows). Fifteen additional gRNA's were designed and evaluated for individual disruption of TRBC1 and TRBC2 in addition to the four overlapping guides. After evaluating all 19 gRNA's, two gRNAs targeting both TRBC1 and TRBC2 demonstrated >60% cutting efficiency (FIG. 28B). Specifically, FIG. 28B shows tiling results of the TRBC gRNAs (x-axis) with the resulting INDEL and Substitution frequencies (y-axis). Some gRNAs were analyzed with two different primer sets, and these are marked with a ‘l’ or ‘2’ in the top of the panel.

[0459] CD3E. 42 gRNA's were designed and synthesized as part of the initial panel. 9 gRNA's were characterized with a cutting efficiency of higher than 60% (FIGS. 28C and 1D). Specifically, FIG. 28C shows a schematic overview of the protein coding exons of CD3E and the location of the designed gRNAs (black arrows). We identified 7 gRNAs with ˜50% substitutions in the experimental and control sample. These regions most likely contain a SNP in the spacer or its approximate region (−/+10 nt from the cut site). Specifically, FIG. 28D shows tiling results of the CD3E gRNAs (x-axis) with the resulting INDEL and substitution frequencies (y-axis). Black filled circles represent cells treated with RNPs, empty circle samples are controls where wildtype Jurkat genomic DNA for Amplicon-NGS was used.

[0460] CD40LG. 60 gRNAs were designed to target CD40LG (FIG. 29A). Specifically, FIG. 29A shows a schematic overview of the protein coding exons of CD40LG and the location of the designed gRNAs (black arrows). Initial evaluation of the full panel of gRNAs revealed nine gRNA candidates with a cutting efficiency that was higher than 60% (FIG. 29B). Specifically, FIG. 29B shows tiling results of the CD40LG gRNAs (x-axis) with the resulting INDEL and substitution frequencies (y-axis).

[0461] CSF2: 25 gRNAs were potentially active in the protein-coding exon of CSF2 (FIG. 29C). Specifically, FIG. 29C shows a schematic overview of the protein coding exons of CSF2 and the location of the designed gRNAs (black lines). After initial evaluation of editing efficiency, three gRNAs resulted in low to moderate cutting efficiency of 10-30% (FIG. 29D). Specifically, FIG. 29D shows tiling results of the CSF2 gRNAs (x-axis) with the resulting INDEL and Substitution frequencies (y-axis). Black filled circles represent cells treated with RNPs, empty circle samples are controls and wildtype Jurkat genomic DNA for Amplicon-NGS was used. In addition, we observed that three gRNAs had potential heterozygous SNPs in the spacer and/or surrounding region of the spacer, and an additional seven gRNAs had potential homozygous SNPs. The genome of Jurkat cells is available (Gioia et al. 2018) and revealed indeed two SNPs in this region. In addition, three gRNA target sequences were affected by the SNPs. To screen for additional gRNAs with a cutting efficiency >60%, we redesigned the four gRNAs with the observed SNP's in addition to 26 gRNAs that targeted CSF2 introns. Six gRNAs showed a cutting efficiency >40% in the second pass evaluation and were promoted for additional characterization and optimization.

TABLE 13
Cutting efficiencies and off-target scores for selected gRNAs

| | | Average | | |
|---|---|---|---|---|
| | | on-target | Off-target | |
| | | editing | score | Total |
| Index | gRNA_name | efficiency | (predicted) | score |
| 1 | gCSF2_007 | 31.1 | 98.8 | 30.7 |
| 2 | gCSF2_005 | 27.8 | 77.1 | 21.4 |
| 3 | gCSF2_003 | 14.2 | 75.6 | 10.7 |
| 4 | gCD40LG_041 | 89.3 | 95.8 | 85.5 |
| 5 | gCD40LG_040 | 88.9 | 95.3 | 84.7 |
| 6 | gCD40LG_052 | 81.7 | 95.8 | 78.3 |
| 7 | gCD40LG_053 | 80.1 | 95.0 | 76.1 |
| 8 | gCD40LG_023 | 84.1 | 89.8 | 75.5 |
| 9 | gCD40LG_058 | 72.1 | 96.7 | 69.7 |
| 10 | gCD40LG_035 | 69.9 | 90.6 | 63.3 |
| 11 | gCD40LG_021 | 64.3 | 90.8 | 58.4 |
| 12 | gCD40LG_030 | 61.7 | 78.1 | 48.2 |
| 13 | gCD40LG_046 | 40.1 | 94.5 | 37.9 |
| 14 | gCD3E_34 | 92.3 | 94.9 | 87.6 |
| 15 | gCD3E_21 | 88.9 | 94.2 | 83.8 |
| 16 | gCD3E_42 | 80.8 | 97.7 | 78.9 |
| 17 | gCD3E_38 | 78.2 | 90.0 | 70.4 |
| 18 | gCD3E_40 | 72.6 | 92.5 | 67.2 |
| 19 | gCD3E_24 | 68.0 | 96.8 | 65.8 |
| 20 | gCD3E_20 | 56.7 | 91.6 | 51.9 |
| 21 | gCD3E_19 | 46.0 | 90.2 | 41.5 |
| 22 | gCD3E_14 | 71.6 | 56.4 | 40.4 |

[0462] The top gRNAs identified in the tiling experiments in, were further tested by performing additional nucleofections in Jurkat cells and measuring viability, INDEL formation by amplicon-NGS, and functional flow cytometry assays. These nucleofections were performed with two TRBC gRNAs and the CD3E, CD40LG and CSF2 gRNAs (Table 13). For the Amplicon-NGS readout three days after transfection, genomic DNA was prepared, amplicons generated, and sequence analyzed. Functional KO verification was performed with antibody staining for TRBC and CD3E, but not for CD40LG and CSF2, CD40LG and CSF2 are expressed upon activation of T-cells and will be tested for functional KOs in Pan T-cells. In this experiment, ssODNs for TRBC and CSF2 gRNAs (Table 11) were included to induce directed loss of function mutations at the on-target site. The ssODNs are 200 nt in length, centered at the on-target site and contains a 25 nt deletion (PAM+spacer sequence) in the center of the ssODN to force a frame shift upon integration by homology directed repair at the target site.

[0463] TRBC1 and TRBC2 serves as the beta chain of the TCR complex that are located at the surface of the cells, CD3E is present with two subunits in the TCR complex. We leveraged the anti-TCR antibody staining followed by flow cytometry to verify the KO efficiency of the TRBC1 and TRBC2 proteins and the anti-TCR and CD3E antibody for verification of CD3E KO. In addition, CD3E intracellular levels were measured to compare and understand the effectivity of CD3E KO and TCR surface expression because CD3E partial KO might abolish TCR localization to the surface and TCR surface expression as marker might overestimate the CD3E KO efficiency. The Jurkat cells treated with the different gCD3E and gTRBC1/2/RNPs were stained with antibodies for the relevant proteins and analyzed using flow cytometry. The flow cytometry data were gated for viable, single, and TCR or CD3E negative cells and the data of the replicates were summarized as bar plots (TRBC1/2: FIG. 30A: CD3E; FIGS. 31B and C). Specifically, FIG. 30A shows TCR staining results (TCR negative cells on y-axis) after transfection of TRBC1 and TRBC2 RNPs and the control (x-axis): FIGS. 31B and C show TCR and CD3E staining results (TCR and CD3E negative cells on y-axis respectively) after transfection of gCD3E RNPs and the controls (x-axis). Performing nucleofection with the gTRBC1_2_001 and gTRBC1_2_003 RNPs resulted in an increase to more than 90% TCR negative cells of the population. The addition of ssODNs did not increase the negative population (FIG. 30A). The viability of the treated cells are shown in FIGS. 30B and 31D for TRBC1/2 and CD3E respectively.

[0464] Transfection of gCD3E_24 and gCD3E_34 resulted in ˜85 and ˜75% TCR negative cells, respectively. Transfection with all other gRNAs resulted in less than 50% TCR negative cells (FIG. 31B). Similar, CD3E surface staining resulted in a comparable negative cell population as observed for TCR (FIG. 31C). The intracellular CD3E amount was slightly higher relative to CD3E surface amount (FIG. 31C). However, the CD3E or TCR surface staining can be used to determine the KO efficiency of the CD3E RNP-transfected cells. Amplicon-NGS verified that the cutting efficiency of the different gRNAs was above 50% (FIG. 31A) as observed before, but only the cutting rate of gCD3E_24 and gCD3E_34 correlate with their functional KO efficiency. Interestingly, both gRNAs were targeting the protein-coding exon 6 and exon 6 might be the optimal CRISPR target to obtain functional KO of CD3E. The viability of the cells treated with the different RNPs were above 85% (FIG. 31D).

[0465] Nine CD40LG gRNAs in complex with Art-Mad7mam+ were further tested and the cutting efficiency and their impact of the viability after transfection in Jurkat cells was assessed. All tested gRNAs except gCD40LG_030 were verified as strong cutters (FIG. 32A) when compared to the tiling experiment and no obvious impact on viability after transfection was observed (FIG. 32B).

[0466] Three gRNAs with moderate cutting efficiency based on Amplicon-NGS analysis were further optimized and tested. To optimize, ssODNs were designed for all three gRNAs to direct mutagenesis via HDR and increase KO efficiency. In addition, all three gRNAs were combined in a single transfection in an effort to maximize editing. We observed a similar efficiency pattern to that detected in the initial tiling experiment in that gCSF2_3 and gCSF2_7 showed the lowest and highest cutting efficiency respectively. The inclusion of ssODNs in the transfection further increased the mutation rate by ˜1.5 fold in all three cases and no toxicity effect were observed after electroporation (FIGS. 32C and D respectively).

[0467] To further test the effects of ssODNs, single and dual gRNAs were mixed with Art-MAD7mam+ nuclease, and in some cases included a ssODN designed to create a programmed disruption in the target gene. The freshly isolated Pan-T cells were activated and cultured for 2 days, and RNPs−/+ssODNs were transfected using the Lonza 96-well plate shuttle. Following transfection, samples were obtained at day 3 after electroporation for gDNA extraction and NGS verification of cutting/editing and off-target analysis using rhAmp-seq at day 6, followed by flow cytometry analysis of functional disruption of the TCR, CD3E and CD40LG and CSF2, respectively, and a time course was taken to evaluate viability. Functional disruption of TCR in Pan T-cells was achieved by transfecting RNPs with gTRBC1_2_003 and gCD3E_34. In both cases, the INDEL frequency was ˜90% at the on-target site using the regular gRNA configuration (FIGS. 33A and B). The dual configuration resulted in ˜5% lower INDEL frequency in case of TRBC1 and TRBC2 and a stronger reduction of ˜15% for CD3E. The inclusion of ssODNs increased the perfect HDR rate to ˜40% at the genomic level and increased the mutation rate in all cases >90%. The functional KO rates for both targets were like the mutation rates observed with Amplicon-NGS readout and resulted in >90% negative TCR/CD3E cell population for the regular and dual gRNAs with ssODNs (FIG. 33C).

[0468] For gCD40LG_40, ˜90% mutation rates were detected with both the regular and the dual gRNA configuration (FIG. 33D), CD40LG is expressed at the cell surface upon activation of Pan T-cells. Therefore, the Pan T-cells were activated with CD3/CD28 for 6 hours prior to anti-CD40LG staining and ˜70% of the Pan T-cells expressed CD40LG at the surface. Despite activation, around 90% of the cell population that were transfected with RNPs remained CD40LG negative (FIG. 33D).

[0469] The best CSF2 gRNA was identified as gCSF2_007 in the Jurkat experiment. In Pan T-cells, the cutting efficiency was approximately 65% and 45% and could be increased by ssODN inclusion to ˜80 and 70% for the regular and STAR design, respectively (FIG. 33E). CSF2 is a secreted protein and is expressed and upregulated in activated cells. The cells were treated with PMA and Ionomycin to strongly activate the cells and blocked the secretion of the protein with Golgiplug and Golgistop and stained the cells after fixation and permeabilization for the intracellular accumulated CSF2 proteins. This process resulted in 70% of the cell population positive for CSF2 in the control cells without RNP transfection. CSF2 gRNA treatment increased the negative CSF2 cell population to ˜75% and ˜60% and were further increased with the ssODN to ˜90% and 80% for regular and dual gRNA, respectively (FIG. 33G).

### X. Equivalents

[0470] Throughout the description, where compositions are described as having, including, or comprising specific components, or where processes and methods are described as having, including, or comprising specific steps, it is contemplated that, additionally, there are compositions of the present invention that consist essentially of, or consist of, the recited components, and that there are processes and methods according to the present invention that consist essentially of, or consist of, the recited processing steps.

[0471] In the application, where an element or component is said to be included in and/or selected from a list of recited elements or components, it should be understood that the element or component can be any one of the recited elements or components, or the element or component can be selected from a group consisting of two or more of the recited elements or components.

[0472] Further, it should be understood that elements and/or features of a composition or a method described herein can be combined in a variety of ways without departing from the spirit and scope of the present invention, whether explicit or implicit herein. For example, where reference is made to a particular compound, that compound can be used in various embodiments of compositions of the present invention and/or in methods of the present invention, unless otherwise understood from the context. In other words, within this application, embodiments have been described and depicted in a way that enables a clear and concise application to be written and drawn, but it is intended and will be appreciated that embodiments may be variously combined or separated without parting from the present teachings and invention(s). For example, it will be appreciated that all features described and depicted herein can be applicable to all aspects of the invention(s) described and depicted herein.

[0473] The terms “a” and “an” and “the” and similar references in the context of describing the invention (especially in the context of the following claims) are to be construed to cover both the singular and the plural, unless otherwise indicated herein or clearly contradicted by context. For example, the term “a cell” includes a plurality of cells, including mixtures thereof. Where the plural form is used for compounds, salts, or the like, this is taken to mean also a single compound, salt, or the like.

[0474] It should be understood that the expression “at least one of” includes individually each of the recited objects after the expression and the various combinations of two or more of the recited objects unless otherwise understood from the context and use. The expression “and/or” in connection with three or more recited objects should be understood to have the same meaning unless otherwise understood from the context.

[0475] The use of the term “include,” “includes,” “including,” “have,” “has,” “having,” “contain,” “contains,” or “containing,” including grammatical equivalents thereof, should be understood generally as open-ended and non-limiting, for example, not excluding additional unrecited elements or steps, unless otherwise specifically stated or understood from the context.

[0476] Where the use of the term “about” is before a quantitative value, the present invention also includes the specific quantitative value itself, unless specifically stated otherwise. As used herein, the term “about” refers to a +10% variation from the nominal value unless otherwise indicated or inferred.

[0477] It should be understood that the order of steps or order for performing certain actions is immaterial so long as the present invention remain operable. Moreover, two or more steps or actions may be conducted simultaneously.

[0478] The use of any and all examples, or exemplary language herein, for example, “such as” or “including,” is intended merely to illustrate better the present invention and does not pose a limitation on the scope of the invention unless claimed. No language in the specification should be construed as indicating any non-claimed element as essential to the practice of the present invention.

[0479] The invention may be embodied in other specific forms without departing from the spirit or essential characteristics thereof. The foregoing embodiments are therefore to be considered in all respects illustrative rather than limiting on the invention described herein. Scope of the invention is thus indicated by the appended claims rather than by the foregoing description, and all changes that come within the meaning and range of equivalency of the claims are intended to be embraced therein.

1. A composition comprising a plurality of ssODNs wherein each of the ssODNs comprises a sequence that is complementary to and specific for a sequence flanking a strand break at an off-target site for a nucleic acid-guided nuclease complex comprising a nucleic acid-guided nuclease and a guide nucleic acid (gNA) wherein the ssODNs each comprise different sequences for different off-target sites.

2. The composition of claim 0 further comprising the nucleic acid-guided nuclease and gNA.

3. The composition of claim 0, wherein each ssODN further comprises a sequence coding for a wild-type gene at the off-target site.

4. The composition of claim 1, wherein at least 10, 20, 30, 40, 50, 60, 70, 80, 90, 95, 99, or 100% of the ssODNs comprise at least one mutation compared to the wild-type sequence.

5. The composition of claim 0, wherein the mutation comprises a mutation to a PAM, and optionally wherein the mutation to the PAM decreases or eliminates recognition of the off-target site by the nucleic acid-guided nuclease complex.

6-11. (canceled)

12. The composition of claim 1, wherein the nucleic acid-guided nuclease is a Type V-A nuclease.

13. The composition of claim 0 wherein the nucleic acid-guided nuclease is a MAD nuclease, an ART nuclease, or an ABW nuclease.

14-24. (canceled)

25. The composition of claim 1, wherein the gNA comprises
(A) a targeter nucleic acid comprising a targeter stem sequence and a spacer sequence; and
(B) a modulator nucleic acid comprising a modulator stem sequence complementary to the targeter stem sequence, and, optionally, a 5′ sequence.

26. The composition of claim 25, wherein the gNA is an engineered, non-naturally occurring guide nucleic acid.

27. (canceled)

28. The composition of claim 1, wherein the gNA comprises a dual guide nucleic acid, wherein the targeter nucleic acid and the modulator nucleic acid are separate polynucleotides.

29-43. (canceled)

44. A method of cleaving at or near a target nucleic acid sequence which is at or near an on-target site within a target polynucleotide comprising contacting the target polynucleotide with the composition of claim 2, wherein the nucleic acid-guided nuclease complex cleaves at least one strand of the target polynucleotide within the on-target site.

45. A method of editing a genome of a eukaryotic cell comprising delivering the composition of claim 2 into the eukaryotic cell, thereby resulting in editing of the genome of the eukaryotic cell.

46-51. (canceled)

52. A composition comprising
(A) a nucleic acid-guided nuclease complex comprising a Type V nuclease and a compatible gNA wherein the nucleic acid-guided nuclease complex specifically binds to a target nucleic acid sequence at or near an on-target site and cleaves at or near the target nucleic acid sequence to create a strand break in the on-target site; and
(B) a first ssODN.

53. The composition of claim 0, wherein the first ssODN comprises a sequence that is complementary to a sequence flanking the strand break in the on-target site on the 3′ side or the 5′ side of the strand break.

54. (canceled)

55. The composition of claim 0, further comprising a second ssODN comprising a sequence that is complementary to a sequence flanking the strand break in the on-target site on the 5′ side or the 3′ side of the strand break.

56-61. (canceled)

62. The composition of claim 52, further comprising one or more ssODNs that are complementary to a sequence flanking the strand break in the one or more off-target sites.

63-69. (canceled)

70. The composition of claim 52, wherein the nuclease is a Type V-A nuclease.

71. The composition of claim 52, wherein the nucleic acid-guided nuclease is a MAD nuclease, an ART nuclease, or an ABW nuclease.

72-82. (canceled)

83. The composition of claim 52, wherein the gNA comprises
(A) a targeter nucleic acid comprising a targeter stem sequence and a spacer sequence; and
(B) a modulator nucleic acid comprising a modulator stem sequence complementary to the targeter stem sequence, and, optionally, a 5′ sequence.

84-85. (canceled)

86. The composition of claim 83, wherein the gNA comprises a dual guide nucleic acid, wherein the targeter nucleic acid and the modulator nucleic acid are separate polynucleotides.

87-119. (canceled)

120. A composition for integrating at least a portion of a donor template at or near a strand break at an on-target or off-target site in a genome of a cell comprising
(A) a donor template lacking one or both homology arms complementary to a sequence or sequences flanking the strand break; and
(B) a first ssODN comprising
(i) a first portion comprising a sequence complementary to at least a 5′ or 3′ portion of the donor template, and
(ii) a second portion comprising a sequence homologous to a sequence flanking the strand break.

121. The composition of claim 0 further comprising:
(C) a second ssODN comprising
(i) a first portion comprising a sequence complementary to at least a 5′ or 3′ portion of the donor template different from the first ssODN, and
(ii) a second portion comprising a sequence homologous to a sequence flanking the strand break.

122. A method for integrating at least a portion of a donor template at a strand break in a target site in a genome of a cell comprising delivering to a cell a composition comprising
(A) the composition of claim 120 to the target cell; and
(B) a nucleic acid guided nuclease complex comprising a nucleic acid-guided nuclease and a compatible gNA, wherein the complex is capable of producing the strand break.

123. (canceled)

124. A composition comprising a plurality of ssODNs comprising
(A) a first ssODN comprising
(i) a first portion comprising a sequence homologous to a sequence upstream of a target site in a genome of a target cell, and
(ii) a second portion comprising a sequence comprising at least a portion of a heterologous sequence to be inserted into the genome of the target cell;
(B) a second ssODN comprising
(i) a first portion comprising a sequence homologous to a sequence downstream of a target site in a genome of a target cell, and
(ii) a second portion comprising a sequence at least partially complementary to at least a portion of the heterologous sequence to be inserted into the genome of the target cell; and, optionally,
(C) one or more additional ssODNs each comprising
(i) a sequence comprising at least a portion of a heterologous sequence to be inserted into the genome of the target cell, and
(ii) a second portion comprising a sequence at least partially complementary to at least a portion of the heterologous sequence to be inserted into the genome of the target cell;
wherein the plurality of ssODNs comprises the entirety of heterologous sequence to be inserted into the genome of the target cell.

125. A method for inserting a heterologous sequence at or near a target site in a genome of a cell comprising delivering the composition of claim 0 to the cell and a nucleic acid-guided nuclease complex capable of binding to and cleaving at the target site.

126. (canceled)

127. A method comprising contacting a population of cells with a composition comprising
(A) a nucleic acid-guided nuclease complex comprising a nucleic acid-guided nuclease and a compatible gNA, wherein the complex can bind to and cleave at an on-target site and one or more off-target sites in the genomes of the cells in the population of cells,
(B) a ssODN, and
(C) one or more ssODNs for one or more of the off-target sites.

128-130. (canceled)

131. A composition comprising
(A) a guide RNA (gRNA) comprising
(i) a first nucleotide sequence that hybridizes to a target nucleic acid sequence in a genome of a cell, and
(ii) a second nucleotide sequence that interacts with a Cas nuclease;
(B) the Cas nuclease, comprising an RNA-binding portion that interacts with the second nucleotide sequence of the guide RNA to form a ribonucleoprotein (RNP) complex, wherein the RNP complex
(i) specifically binds to the target nucleic acid sequence at an on-target site and cleaves at or near the target nucleic acid sequence to create a double-stranded break in the on-target site, and
(ii) also binds to one or more off-target nucleic acid sequences at one or more off-target sites and cleaves at or near the one or more off-target nucleic acid sequences to create a double-strand break in the one or more off-target sites;
(C) a first, on-target ssODN comprising a sequence complementary to a sequence flanking the double stranded break in the on-target site, wherein the ssODN integrates into DNA in the on-target site; and
(D) a second, off-target ssODN comprising a sequence complementary to a genomic sequence flanking a double stranded break in a first off-target site and integrates into the DNA in the off-target site, wherein the second ssODN comprises
(i) homology arms for the off-target site that are more complementary to the genomic sequence at the off-target site than homology arms of the on-target ssODN.

132. (canceled)

133. The composition of claim 0 wherein the second ssODN further comprises at least one synonymous mutation to reduce or eliminate re-cleavage at the off-target site following integration of the second ssODN.

134-137. (canceled)

138. The composition of claim 0 wherein gRNA is dual gRNA.

139-141. (canceled)

142. The composition of claim 131, wherein the Cas nuclease is a type V-A Cas nuclease, optionally wherein the Type V-A Cas nuclease is a Cpf1, MAD, Csm1, ART, or ABW nuclease, or derivative or variant thereof.

143. (canceled)

The application's sequence listing, which the Patent Office published only in electronic form, follows.

SEQUENCE LISTING (1892 sequences)

SEQ ID NO: 1 - protein, 1244 aa, Unknown
  Description of Unknown: ART1 sequence
METFSGFTNLYPLSKTLRFRLIPVGETLKHFIDSGILEEDQHRAESYVKVKAIIDDYHRAYIENSLSGFELPLESTKFNSLEEYYLYHNIRNKTEEIQNLSSKVRTNLRKQVVAQLTKNEIFKRIDKKELIQSDLIDFVKNEPDANEKIALISEFRNFTVYFKGFHENRRNMYSDEEKSTSIAFRLIHENLPKFIDNMEVFAKIQNTSISENFDAIQKELCPELVTLCEMFKLGYFNKTLSQKQIDAYNTVIGGKTTSEGKKIKGLNEYINLYNQQHKQEKLPKMKLLFKQILSDRESASWLPEKFENDSQVVGAIVNFWNTIHDTVLAEGGLKTIIASLGSYGLEGIFLKNDLQLTDISQKATGSWGKISSEIKQKIEVMNPQKKKESYETYQERIDKIFKSYKSFSLAFINECLRGEYKIEDYFLKLGAVNSSSLQKENHFSHILNTYTDVKEVIGLYSESTDTKLIQDNDSIQKIKQFLDAVKDLQAYVKPLLGNGDETGKDERFYGDLIEYWSLLDLITPLYNMVRNYVTQKPYSVDKIKINFQNPTLLNGWDLNKETDNTSVILRRDGKYYLAIMNNKSRKVFLKYPSGTDRNCYEKMEYKLLPGANKMLPKVFFSKSRINEFMPNERLLSNYEKGTHKKSGTCFSLDDCHTLIDFFKKSLDKHEDWKNFGFKFSDTSTYEDMSGFYKEVENQGYKLSFKPIDATYVDQLVDEGKIFLFQIYNKDFSEHSKGTPNMHTLYWKMLFDETNLGDVVYKLNGEAEVFFRKASINVSHPTHPANIPIKKKNLKHKDEERILKYDLIKDKRYTVDQFQFHVPITMNFKADGNGNINQKAIDYLRSASDTHIIGIDRGERNLLYLVVIDGNGKICEQFSLNEIEVEYNGEKYSTNYHDLLNVKENERKQARQSWQSIANIKDLKEGYLSQVIHKISELMVKYNAIVVLEDLNAGFMRGRQKVEKQVYQKFEKKLIEKLNYLVFKKQSSDLPGGLMHAYQLANKFESFNTLGKQSGFLFYIPAWNTSKMDPVTGFVNLFDVKYESVDKAKSFFSKFDSIRYNVERDMFEWKFNYGEFTKKAEGTKTDWTVCSYGNRIITFRNPDKNSQWDNKEINLTENIKLLFERFGIDLSSNLKDEIMQRTEKEFFIELISLFKLVLQMRNSWTGTDIDYLVSPVCNENGEFFDSRNVDETLPQNADANGAYNIARKGMILLDKIKKSNGEKKLALSITNREWLSFAQGCCKNG

SEQ ID NO: 2 - protein, 1197 aa, Unknown
  Description of Unknown: ART2 sequence
MLSNFTNQYQLSKTLRFELKPVGDTLKHIEKSGLIAQDEIRSQEYQEVKTIIDKYHKAFIDEALQNVVLSNLEEYEALFFERNRDEKAFEKLQAVLRKEIVAHFKQHPQYKTLFKKELIKADLKNWQELSDAEKELVSHFDNFTTYFTGFHENRANMYTDEAKHSSIAYRIIHENLPIFLTNKKLFETIKQKAPHLAQETQDALLEYLSGAIVEDMFELSYFNHLLSQTHIDLYNQMIGGVKQDSLKIQGLNEKINLYRQANGLSKRELPNLKPLHKQILSDRETLSWLPESFESDEELMQGVQAYFESEVLAFECCDGKVNLLEKLPELLHQTQDYDFSKVYFKNDLALTAASQAIFKDYRIIKEALWEVNKPKKSKDLVADEEKFFNKKNSYFSIEQIDGALNSAQLSANMMHYFQSESTKVIEQIQLTYNDWKRNSSNKELLKAFLDALLSYQRLLKPLNAPNDLEKDVAFYAYFDAYFTSLCGVVKLYDKVRNFMTKKPYSLEKFKLNFENSTLLDGWDVNKESDNTAILFRKEGLYYLGIMNKKYNKVFRNISSSQDEGYQKIDYKLLPGANKMLPKVFFSDKNKEYFKPNAKLLERYKAGEHKKGDNFDLDFCHELIDFFKTSIEKHQDWKHFAYQFSPTESYEDLSGFYREVEQQGYKISYKNIAASFIDTLVAEGKLYFFQIYNKDFSPYSKGTPNMHTLYWRALFDEKNLADVIYKLNGQAEIFFRKKSIEYSQEKLQKGHHHEMLKDKFAYPIIKDRRFAFDKFQFHVPITLNFKAEGNENITPKTFEYIRSNPDNIKVIGIDRGERHLLYLSLIDAEGKIVEQFTLNQIINSYNGKDHVIDYHAKLDAKEKDRDKARKEWGTVENIKELKEGYLSHVIHKIATLIIEHGAVVAMEDLNFGFKRGRFKVEKQVYQKFEKALIDKLNYLVDKKKEPHKLGGLLNALQLTSKFQSFEKMGKQNGFLFYVPAWNTSKIDPVTGFVNLFDTRYASVEKSKAFFTKFQSICYNEAKDYFELVFDYNDFTEKAKETRSEWTLCTYGERIVSFRNAEKNHQWDSKTIHLTTEFKNLFGELHGNDVKEYILEQNSVEFFKSLIYLLKITLQMRNSITGTDIDYLVSPVADEAGNFYDSRKADTSLPKDADANGAYNIARKGLMLMHRIQNAEDLKKVNLAISNRDWLRNAQGLDK

SEQ ID NO: 3 - protein, 1252 aa, Unknown
  Description of Unknown: ART3 sequence
MIDLKQFIGIYPVSKTLRFELRPVGKTQEWIEKNRVLEGDEQKAADYPVVKKLIDDYHKVCIHDSLNHVHFDWEPLKDAIEIFQKTKSDEAKKRLEAEQAMMRKKIAAAIKDFKHFKELTAATPSDLITSVLPEFSDDGSLKSFRGFATYFSGFQENRNNIYSQEAISTGVPYRLVHDNFPKFLSDLEVFERIKSTCPEVINQASAELQPFLEGVMIDDIFSLDFYNSLLTQNGIDFFNQVIGGVSEKDKQKYRGINEFSNLYRQQHKEIAASKKAMTMIPLFKQILSDRDTLSYIPAQIRTEDELVSSITQFYDHITHFEHDGKTINVLSEIVALLGKLDTYDPNGICITARKLTDISQKVYGKWSVIEEKMKEKAIQQYGDISVAKNKKKVDAFLSRKAYSLSDLCFDEEISFSRYYSELPQTLNAISGYWLQFNEWCKSDEKQKFLNNQTGTEVVKSLLDAMMELFHKCSVLVMPEEYEVDKSFYNEFLPLYEELDTLFLLYNKVRNYLTQKPSDVKKFKLNFESPSLASGWDQNKEMKNNAILLFKDGKSYLGVLNAKNKAKIKDAKGDVSSSSYKKMIYKLLSDPSKDLPHKIFAKGNLDFYKPSEYILEGRELGKYKKGPNFDKKFLHDFIDFYKAAISIDPDWSKFNFQYSPTESYDDIGMFFSEIKKQAYKIRFTDISEAQVNEWVDNGQLYLFQLYNKDYAEGAHGRKNLHTLYWENLFTDENLSNLVLKLNGQAELFCRPQSIKKPVSHKIGSKMLNRRDKSGMPIPESIYRSLYQYYNGKKKESELTVAEKQYIDQVIVKDVTHEIIKDRRYTRQEYFFHVPLTFNANADGNEYINEHVLNYLKDNPDVNIIGIDRGERHLIYLTLINQRGEILKQKTFNVVNSYNYQAKLEQREKERDEARKSWDSVGKIKDLKEGFLSAVIHEITNMMIENNAIVVLEDLNFGFKRGRFKVERQVYQKFEKMLIDKLNYLSFKDREAGEEGGILRGYQMAQKFISFQRLGKQSGFLFYIPAAYTSKIDPVSGFVNHFNFSDITNAEKRKDFLMKMDRIEMKNGNIEFTFDYRKFKTFQTDYQNVWTVSTFGKRIVMRIDEKGYKKMVDYEPTNDIIKAFKNKGILLSEGSDLKALIAEIEANATNAGFYSTLLYAFQKTLQMRNSNAVTEEDYILSPVAKDGHQFCSTDEANKGKDAQGNWVSKLPVDADANGAYHIALKGLYLLRNPETKKIENEKWLQFMVEKPYLE

SEQ ID NO: 4 - protein, 1287 aa, Unknown
  Description of Unknown: ART4 sequence
MSYNREKMEEKELGKNQNFQEFIGVSPLQKTLRNELIPTETTKKNIAQLDLLTEDEVRAQNREKLKEMMDDYYRDVIDSTLRGELLIDWSYLFSCMRNHLSENSKESKRELERTQDSVRSQIHDKFAERADFKDMFGASIITKLLPTYIKQNSKYSERYDESVKIMKLYGKFTTSLTDYFETRKNIFSKEKISSAVGYRIVEENAEIFLQNQNAYDRICKIAGLDLHGLDNEITAYVDGKTLKEVCSDEGFAKVITQGGIDRYNEAIGAVNQYMNLLCQKNKALKPGQFKMKRLHKQILCKGTTSFDIPKKFENDKQVYDAVNSFTEIVTKNNDLKRLLNITQNANDYDMNKIYVVADAYSMISQFISKKWNLIEECLLDYYSDNLPGKGNAKENKVKKAVKEETYRSVSQLNEVIEKYYVEKTGQSVWKVESYISSLAEMIKLELCHEIDNDEKHNLIEDDEKISEIKELLDMYMDVFHIIKVFRVNEVLNFDETFYSEMDEIYQDMQEIVPLYNHVRNYVTQKPYKQEKYRLYFHTPTLANGWSKSKEYDNNAIILVREDKYYLGILNAKKKPSKEIMAGKEDCSEHAYAKMNYYLLPGANKMLPKVFLSKKGIQDYHPSSYIVEGYNEKKHIKGSKNFDIRFCRDLIDYFKECIKKHPDWNKFNFEFSATETYEDISVFYREVEKQGYRVEWTYINSEDIQKLEEDGQLFLFQIYNKDFAVGSTGKPNLHTLYLKNLFSEENLRDIVLKLNGEAEIFFRKSSVQKPVIHKCGSILVNRTYEITESGTTRVQSIPESEYMELYRYFNSEKQIELSDEAKKYLDKVQCNKAKTDIVKDYRYTMDKFFIHLPITINFKVDKGNNVNAIAQQYIAEQEDLHVIGIDRGERNLIYVSVIDMYGRILEQKSFNLVEQVSSQGTKRYYDYKEKLQNREEERDKARKSWKTIGKIKELKEGYLSSVIHEIAQMVVKYNAIIAMEDLNYGFKRGRFKVERQVYQKFETMLISKLNYLADKSQAVDEPGGILRGYQMTYVPDNIKNVGRQCGIIFYVPAAYTSKIDPTTGFINAFKRDVVSTNDAKENFLMKFDSIQYDIEKGLFKFSFDYKNFATHKLTLAKTKWDVYTNGTRIQNMKVEGHWLSMEVELTTKMKELLDDSHIPYEEGQNILDDLREMKDITTIVNGILEIFWLTVQLRNSRIDNPDYDRIISPVLNNDGEFFDSDEYNSYIDAQKAPLPIDADANGAFCIALKGMYTANQIKENWVEGEKLPADCLKIEHASWLAFMQGERG

SEQ ID NO: 5 - protein, 1295 aa, Unknown
  Description of Unknown: ART5 sequence
MSAVFKIKESTMKDFTHQYSLSKTLRFELKPVGETAERIEDFKNQGLKSIVEEDRQRAEDYKKMKRILDDYHKEFIEEVLNDDIFTANEMESAFEVYRKYMASKNDDKLKKEITEIFTDLRKKIAKAFENKSKEYCLYKGDFSKLINEKKTGKDKGPGKLWYWLKAKADAGVNEFGDGQTFEQAEEALAKFNNFSTYFTGFNQNRDNIYTDAEQQTAISYRVINENMTRYFDNCIRYSSIENKYPELVKQLEPLSGKFAPGNYKDYLSQTAIDIYNEAVGHKSDDINAKGINQFINEYRQRNSIKGRELPIMSVLYKQILSDINKDLIIDKFENAGELLDAVKTLHRELTDKKILLKIKQTLNEFLTEDNSEDIYIKSGTDLTAVSNAIWGEWSVIPKALEMYAENITDMNAKAREKWLKREAYHLKTVQEAIEAYLKDNEEFETRNISEYFTNFKSGENDLIQVVQSAYAKMESIFGIEDFHKDRRPVTESGEPGEGFRQVELVREYLDSLINVEHFIKPLHMFRSGKPIELEDCNSNFYDPLNEAYKELDVVFGIYNKVRNYVTQKPYSKDKFKINFQNSTLLDGWDVNKESANSSVLLLKNGKYYLGVMKQGASNILNYRPEPSDSKNKINAKKQLSEIALAGATDDYYEKMIYKLLPDPAKMLPKVFFSAKNIEFYNPSQEIIYIRENGLFKKDAGDKESLKKWIGFMKTSLLKHPEWGSYFNFEFEPAEDYQDISIFYKQVAEQGYSVTFDKIKTSYIEEKVASGELYLFEIYNKDFSPHSKGRPNLHTMYWKSLFEKENLQNLVTKLNGEAEVFFRQHSIKRNEKVVHRANRPIQNKNPLTEKKQSIFEYDLVKDRRFTKDKFFLHCPITLNFKEAGPGRFNDKVNKYIAGNPDIRIIGIDRGERHLLYYSLIDQSGRIVEQGTLNQITSTLNSGGREIPKTTDYRGLLDTKEKERDKARKSWSMIENIKELKSGYLSHIVHKLAKLMVKNNAVVVLEDLNFGFKRGRFKVEKQVYQKFEKALIEKLNYLVFKDARPAEPGHYLNAYQLTAPLESFKKLGKQSGFIYYVPAWNTSKIDPVTGFVNQFYIEKNSMQYLKNFFGKFDSIRFNPDKNYFEFGFDYKNFHNKAAKSKWTICTHGDKRSWYNRKQRKLEIHNVTENLASLLSGKGINFADGGSIKDKILSVDDASFFKSLAFNFKLTAQLRHTFEDNGEEIDCIISPVAAADGTFFCSETAKKLNMELPHDADANGAYNIARKGLMVLRQIRESGKPKPISNADWLDFAQQNED

SEQ ID NO: 6 - protein, 1245 aa, Unknown
  Description of Unknown: ART6 sequence
MQERKKISHLTHRNSVQKTIRMQLNPVGKTMDYFQAKQILENDEKLKENYQKIKEIADRFYRNLNEDVLSKTGLDKLKDYAEIYYHCNTDAERKRLDECASELRKEIVKNFKNRDEYNKLFNKKMIEIVLPQHLKNEDEKEVVASFKNFTTYFTGFFTNRKNMYSDGEESTAIAYRCINENLPKHLDNVKAFEKAISKLSKNAIDDLDATYSGLCGTNLYDVFTVDYFNFLLPQSGITEYNKIIGGYTTSDGTKVKGINEYINLYNQQVSKRDKIPNLKILYKQILSESEKVSFIPPKFEDDNELLSAVSEFYANDETFDGMPLKKAIDETKLLFGNLDNSSLNGIYIQNDRSVTNLSNSMFGSWSVIEDLWNKNYDSVNSNSRIKDIQKREDKRKKAYKAEKKLSLSFLQVLISNSENDEIREKSIVNYYKTSLMQLTDNLSDKYNEAAPLLNKSYANEKGLKNDDKSISLIKNFLDAIKEIEKFIKPLSETNITGEKNDLFYSQFTPLLDNISRIDILYDKVRNYVTQKPFSTDKIKLNFGNSQLLNGWDRNKEKDCGAVWLCRDEKYYLAIIDKSNNSILENIDFQDCDENDCYEKIIYKLLPGPNKMLPKVFFSEKCKKLLSPSDEILKIRKNGTFKKGDKFSLDDCHKLIDFYKESFKKYPNWLIYNFKFKNTNEYNDIREFYNDVASQGYNISKMKIPTSFIDKLVDEGKIYLFQLYNKDFSPHSKGTPNLHTLYFKMLFDERNLEDVVYKLNGEAEMFYRPASIKYDKPTHPKNTPIKNKNTLNDKKTSTFPYDLIKDKRYTKWQFSLHFPITMNFKAPDRAMINDDVRNLLKSCNNNFIIGIDRGERNLLYVSVIDSNGAIIYQHSLNIIGNKFKGKTYETNYREKLATREKERTEQRRNWKAIESIKELKEGYISQAVHVICQLVVKYDAIIVMEKLTDGFKRGRTKFEKQVYQKFEKMLIDKLNYYVDKKLDPDEGGGLLHAYQLTNKLESFDKLGMQSGFIFYVRPDFTSKIDPVTGFVNLLYPRYENIDKAKDMISRFDDIGYNAGEDFFEFDIDYDKFPKTASDYRKRWTICTNGERIEAFRNPAKNNEWSYRTIILAEKFKELFDNNSINYRDSDDLKAEILSQTKGKFFEDFFKLLRLTLQMRNSNPETGEDRILSPVKDKNGNFYDSSKYDEKSKLPCDADANGAYNIARKGLWIVEQFKKSDNVSTVGPVIHNDKWLKFVQENDMANN

SEQ ID NO: 7 - protein, 1281 aa, Unknown
  Description of Unknown: ART7 sequence
MNILKENYMKEIKELTGLYSLTKTIGVELKPVGKTQELIEAKKLIEQDDQRAEDYKIVKDIIDRYHKDFIDKCLNCVKIKKDDLEKYVSLAENSNRDAEDFDKIKTKMRNQITEAFRKNSLFTNLFKKNLIKEYLPAFVSEEEKSVVNKFSKFTTYFDAFNDNRKNLYSGDAKSGTIAYRLIHENLPMFLDNIASFNAISGIGVNEYFSSIETEFTDTLEGKRLTEFFQIDFFNNTLTQKKIGNYNYIVGAVNKAVNLYKQQHKTVRVPLLKPLYKMILSDRVTPSWLPERFESDEEMLTAIKAAYESLREVLVGDNDESLRNLLLNIEHYDLEHIYIANDSGLTSISQKIFGCYDTYTLAIKDQLQRDYPATKKQREAPDLYDERIDKLYKKVGSFSIAYLNRLVDAKGHFTINEYYKQLGAYCREEGKEKDDFFKRIDGAYCAISHLFFGEHGEIAQSDSDVELIQKLLEAYKGLQRFIKPLLGHGDEADKDNEFDAKLRKVWDELDIITPLYDKVRNWLSRKIYNPEKIKLCFENNGKLLSGWVDSRTKSDNGTQYGGYIFRKKNEIGEYDFYLGISADTKLFRRDAAISYDDGMYERLDYYQLKSKTLLGNSYVGDYGLDSMNLLSAFKNAAVKFQFEKEVVPKDKENVPKYLKRLKLDYAGFYQILMNDDKVVDAYKIMKQHILATLTSSIRVPAAIELATQKELGIDELIDEIMNLPSKSFGYFPIVTAAIEEANKRENKPLFLFKMSNKDLSYAATASKGLRKGRGTENLHSMYLKALLGMTQSVFDIGSGMVFFRHQTKGLAETTARHKANEFVANKNKLNDKKKSIFGYEIVKNKRFTVDKYLFKLSMNLNYSQPNNNKIDVNSKVREIISNGGIKNIIGIDRGERNLLYLSLIDLKGNIVMQKSLNILKDDHNAKETDYKGLLTEREGENKEARRNWKKIANIKDLKRGYLSQVVHIISKMMVEYNAIVVLEDLNPGFIRGRQKIERNVYEQFERMLIDKLNFYVDKHKGANETGGLLHALQLTSEFKNFKKSEHQNGCLFYIPAWNTSKIDPATGFVNLFNTKYTNAVEAQEFFSKFDEIRYNEEKDWFEFEFDYDKFTQKAHGTRTKWTLCTYGMRLRSFKNSAKQYNWDSEVVALTEEFKRILGEAGIDIHENLKDAICNLEGKSQKYLEPLMQFMKLLLQLRNSKAGTDEDYILSPVADENGIFYDSRSCGDQLPENADANGAYNIARKGLMLIEQIKNAEDLNNVKFDISNKAWLNFAQQKPYKNG

SEQ ID NO: 8 - protein, 1293 aa, Unknown
  Description of Unknown: ART8 sequence
MAKENIFNELTGKYQLSKTLRLELKPVGNTQQMLKDEDVFEKDRIIREKYRETRPHFDRLHREFIEQALKNQKLSDLGKYFQCLAKLQNNKKDKEAQEEFKRISQNLRKEVNDLFKIDPLFGEGVFALLKEKYGEKDDAFLREQDGQYVLDENKKKISIFDSWKGFTGYFTKFQETRKNFYKDDGTATAVATRIIDQNLKRFCENIQIFKSIQKKVDFKEVEDNFSVDLEDIFSLGFYSSCFLQEGIDVYNKILGGEPKTTGEKLRGLNELINRYRQDHKGEKLPFFKMLDKQILSEKEKFIESIEDDEELLKTLKEFYSSAEEKTTVLKELFNDFIKNNENYDLSEIYISREALNTISHRWVSAATLPEFEKSVYEVMKKDKPSGLSFDKDDNSYKFPDFIALSYIKGSFEKLSGEKLWKDGYFRDETRNGDKGFLIGNESLWTQFIKIFEFEFNSLFEAKNTERSVGYYHFKKDFEKIITNDFSVNPEDKVIIREFADNVLAIYQMAKYFAIEKKRKWMDQYDTGDFYNHPDFGYKTKFYDNAYEKIVKARMLLQSYLTKKPFSTDKWKLNFECGYLLNGWSSSFNTYGSLLFRTGNEYYLGVVNGSALRTEKIKRLTGNITEANSCHKMVYDFQKPDNKNVPRIFIRSKGDKFAPAVSELNLPVDSILEIYDKGLFKTENKNSPFFKPSLKKLIDYFKLGFSRHASYKHYQFKWKDSSEYKNISEFYNDTIRSCYQIKWEELNFEEVKKLTNSKDLFLFQIYNKDFSEKSTGNKNLHSIYFDGLFLDNNINAQDGVILKLSGGGEIFFRPKTDVKKLGSRTDTKGKLVIKNKRYSQDKIFLHFPIELNYSNTQESNFNKLVRNFLADNPDINIIGVDRGEKHLIYYAGIDQKGNTLKDKDDKDVLGSLNEINGVNYYKLLEERAKAREKARQDWQNIQGIKDLKMGYISLVVRKLADLIIEYNAILVLEDLNMRFKQIHGGIEKSVYQQLEKALIEKLNFLVNKGEKDPERAGHLLRAYQLTAPFSTFKDMGKQTGVLFYTQASYTSKTCPQCGFRPNIKLHFDNLENAKKMLEKINIVYKDNHFEIGYKVSDFTKTEKTSRGNILYGDRQGKDTFVISSKAAIRYKWFARNIKNNELNRGESLKEHTEKGVTIQYDITECLKILYEKNGIDHSGDITKQSIRSELPAKFYKDLLFYLYLLTNTRSSISGTEIDYINCPDCGFHSEKGFNGCIFNGDANGAYNIARKGMLILKKINQYKDQHHTMDKMGWGDLFIGIEEWDKYTQVVSRS

SEQ ID NO: 9 - protein, 1273 aa, Unknown
  Description of Unknown: ART9 sequence
MKEIKELTGLYSLTKTIGVELKPVGKTQELIEAKKLIEQDDQRAEDYKIVKDIIDRYHKDFIDKCLNCVKIKKDDLEKYVSLAENSNRDAEDFDKIKTKMRNQITEAFRKNSLFTNLFKKNLIKEYLPAFVSEEEKSVVNKFSKFTTYFDAFNDNRKNLYSGDAKSGTIAYRLIHENLPMFLDNIASFNAISGIGVNEYFSSIETEFTDTLEGKRLTEFFQIDFFNNTLTQKKIGNYNYIVGAVNKAVNLYKQQHKTVRVPLLKPLYKMILSDRVTPSWLPERFESDEEMLTAIKAAYESLREVLVGDNDESLRNLLLNIEHYDLEHIYIANDSGLTSISQKIFGCYDTYTLAIKDQLQRDYPATKKQREAPDLYDERIDKLYKKVGSFSIAYLNRLVDAKGHFTINEYYKQLGAYCREEGKEKDDFFKRIDGAYCAISHLFFGEHGEIAQSDSDVELIQKLLEAYKGLQRFIKPLLGHGDEADKDNEFDAKLRKVWDELDIITPLYDKVRNWLSRKIYNPEKIKLCFENNGKLLSGWVDSRTKSDNGTQYGGYIFRKKNEIGEYDFYLGISADTKLFRRDAAISYDDGMYERLDYYQLKSKTLLGNSYVGDYGLDSMNLLSAFKNAAVKFQFEKEVVPKDKENVPKYLKRLKLDYAGFYQILMNDDKVVDAYKIMKQHILATLTSSIRVPAAIELATQKELGIDELIDEIMNLPSKSFGYFPIVTAAIEEANKRENKPLFLFKMSNKDLSYAATASKGLRKGRGTENLHSMYLKALLGMTQSVFDIGSGMVFFRHQTKGLAETTARHKANEFVANKNKLNDKKKSIFGYEIVKNKRFTVDKYLFKLSMNLNYSQPNNNKIDVNSKVREIISNGGIKNIIGIDRGERNLLYLSLIDLKGNIVMQKSLNILKDDHNAKETDYKGLLTEREGENKEARRNWKKIANIKDLKRGYLSQVVHIISKMMVEYNAIVVLEDLNPGFIRGRQKIERNVYEQFERMLIDKLNFYVDKHKGANETGGLLHALQLTSEFKNFKKSEHQNGCLFYIPAWNTSKIDPATGFVNLFNTKYTNAVEAQEFFSKFDEIRYNEEKDWFEFEFDYDKFTQKAHGTRTKWTLCTYGMRLRSFKNSAKQYNWDSEVVALTEEFKRILGEAGIDIHENLKDAICNLEGKSQKYLEPLMQFMKLLLQLRNSKAGTDEDYILSPVADENGIFYDSRSCGDQLPENADANGAYNIARKGLMLIEQIKNAEDLNNVKFDISNKAWLNFAQQKPYKNG

SEQ ID NO: 10 - protein, 1300 aa, Unknown
  Description of Unknown: ART10 sequence
MNFQPFFQKFVHLYPISKTLRFELIPQGATQKFISEKQVLLQDEIRARKYPEMKQAIDGYHKDFIQRALSNIDSQVFEQALNTFEDLFLRSQAERATDAYKKDFETAQTKLRELIVHSFEKGEFKQEYKSLFDKNLITNLLKPWVEQQNQIGDSNYTYHEDFNKFTTYFLGFHENRKNIYSKDPHKTALAYRLIHENLPKFLENNKILLKIQNDHPSLWEQLQTLNQTMPQLFDGWDFSQLMQVSFFSNTLTQTGIDQYNTIIGGISEGENRQKIQGINELINLYNQKQDKKNRVAKLKQLYKQILSDRSTLSFLPEKFVDDTELYHAINMFYLEHLHHQSMINGHSYTLLERVQLLINELANYDLSKVYLAPNQLSTVSHQMFGDFGYIGRALNYYYMQVIQPDYEQLLASAKTTKKIEATEKLKTIFLDTPQSLVVIQAAIDEYIQLQPSTKPHTQLTDFIISLLKQYETVADDQSIKVINVFSDIEGKYSCIKGLVNTKSESKREVLQDEKLATDIKAFMDAVNNVIKLLKPFSLNEKLVASVEKDARFYSDFEEIYQSLLIFVPLYNKVRNYITQKPYSTEKFKLNFNKPTLLSGWDANKEADNLSILLRKNGNYYLAIMDTAKGANKAFEPKTLNQLKVDDTTDCYEKMVYKLLSGPSKMFPKAFKAKNNEGNYYPTPELLTSYNNNEHLKNDKNFTLASLHAYIDWCKEYINRNPSWHQFNFKFSPTQSFQDISQFYSEVSSQSYKVHFQTIPSDYIDQLVAEGKLYLFQIYNKDFSPNAKGKENLHTLYFKALFSDENLKQPVFKLSGEAEMFYRPASLQLANTTIHKAGEPMAAKNPLTPNATRTLAYDIIKDRRFTTDKYLLHVPISLNFHAQESMSIKKHNDLVRQMIKHNHQDLHVIGIDRGEKHLLYVSVIDLKGNIVYQESLNSIKSEAQNFETPYHQLLQHREEGRAQARTAWGKIENIKELKDGYLSQVVHRIQQLILKYNAIVMLEDLNFGFKRGRFKIEKQIYQKFEKALIHKLNYVVDKSTQADELGGVRKAYQLTAPFESFEKLGKQSGVLFYVPAWNTSKIDPVTGFVDLLKPKYENLDKAQAFFNAFDSIHYNAQKNYFEFKVNLKQFAGLKAQAAQAEWTICSYGDERHVYQKKNAQQGETVIVNVTEELKVLFAKNNIEVAQSVELKETICTQTQVDFFKRLMWLLQVLLALRYSSSKDKLDYILSPVANAQGEFFDSRHASVQLPQDSDANGAYHIALKGLWVIEQLKAADNLDKVKLAISNDDWLHFAQQKPYLA

SEQ ID NO: 11 - protein, 1205 aa, Unknown
  Description of Unknown: ART11 sequence
MYYQGLTKLYPISKTIRNELIPVGKTLEHIRMNNILEADIQRKSDYERVKKLMDDYHKQLINESLQDVHLSYVEEAADLYLNASKDKDIVDKFSKCQDKLRKEIVNLLKSHENFPKIGNKEIIKLLQSLSDTEKDYNALDSFSKFYTYFTSYNEVRKNLYSDEEKSSTAAYRLINENLPKFLDNIKAYSIAKSAGVRAKELTEEEQDCLFMTETFERTLTQDGIDNYNELIGKLNFAINLYNQQNNKLKGFRKVPKMKELYKQILSEREASFVDEFVDDEALLTNVESFSAHIKEFLESDSLSRFAEVLEESGGEMVYIKNDTSKTTFSNIVFGSWNVIDERLAEEYDSANSKKKKDEKYYDKRHKELKKNKSYSVEKIVSLSTETEDVIGKYIEKLQADIIAIKETREVFEKVVLKEHDKNKSLRKNTKAIEAIKSFLDTIKDFERDIKLISGSEHEMEKNLAVYAEQENILSSIRNVDSLYNMSRNYLTQKPFSTEKFKLNFNRATLLNGWDKNKETDNLGILLVKEGKYYLGIMNTKANKSFVNPPKPKTDNVYHKVNYKLLPGPNKMLPKVFFAKSNLEYYKPSEDLLAKYQAGTHKKGENFSLEDCHSLISFFKDSLEKHPDWSEFGFKFSDTKKYDDLSGFYREVEKQGYKITYTDIDVEYIDSLVEKDELYLFQIYNKDFSPYSKGNYNLHTLYLTMLFDERNLRNVVYKLNGEAEVFYRPASIGKDELIIHKSGEEIKNKNPKRAIDKPTSTFEYDIVKDRRYTKDKFMLHIPVTMNFGVDETRRFNEVVNDAIRGDDKVRVIGIDRGERNLLYVVVVDSDGTILEQISLNSIINNEYSIETDYHKLLDEKEGDRDRARKNWTTIENIKELKEGYLSQVVNVIAKLVLKYDAIICLEDLNFGFKRGRQKVEKQVYQKFEKMLIDKLNYLVIDKSRSQENPEEVGHVLNALQLTSKFTSFKELGKQTGIIYYVPAYLTSKIDPTTGFANLFYVKYESVEKSKDFFNRFDSICFNKVAGYFEFSFDYKNFTDRACGMRSKWKVCTNGERIIKYRNEEKNSSFDDKVIVLTEEFKKLFNEYGIAFNDCMDLTDAINAIDDASFFRKLTKLFQQTLQMRNSSADGSRDYIISPVENDNGEFFNSEKCDKSKPKDADANGAFNIARKGLWVLEQLYNSSSGEKLNLAMTNAEWLEYAQQHTI

SEQ ID NO: 12 - protein, 1306 aa, Unknown
  Description of Unknown: ART12 sequence
MAKNFEDFKRLYPLSKTLRFEAKPIGATLDNIVKSGLLEEDEHRAASYVKVKKLIDEYHKVFIDRVLDNGCLPLDDKGDNNSLAEYYESYVSKAQDEDAIKKFKEIQQNLLSIIAKKLTDDKAYANLFGNKLIESYKDKADKTKLIDSDLIQFINTAESTQLVSMSQDEAKELVKEFWGFTTYFEGFFKNRKNMYTPEEKSTGIAYRLINENLPKFIDNMEAFKKAIARPEIQANMEELYSNFSEYLNVESIQEMFLLDYYNMLLTQKQIDVYNAIIGGKTDDEHDVKIKGINEYINLYNQQHKDDKLPKLKALFKQILSDRNAISWLPEEFNSDQEVLNAIKDCYERLAENVLGDKVLKSLLGSLADYSLDGIFIRNDLQLTDISQKMFGNWGVIQNAIMQNIKHVAPARKHKESEEDYEKRIAGIFKKADSFSISYINDCLNEADPNNAYFVENYFATFGAVNTPTMQRENLFALVQNAYTEVAALLHSDYPTVKHLAQDKANVSKIKALLDAIKSLQHFVKPLLGKGDESDKDERFYGELASLWAELDTVTPLYNMIRNYMTRKPYSQKKIKLNFENPQLLGGWDANKEKDYATIILRRNGLYYLAIMDKDSRKLLGKAMPSDGECYEKMVYKFFKDVTTMIPKCSTQLKDVQAYFKVNTDDYVLNSKAFNRPLTITKEVFDLNNVLYGKYKKFQKGYLTATGDNVGYTHAVNVWIKFCMDFLDSYDSTCIYDFSSLKPESYLSLDSFYQDVNLLLYKLSFTDVSASFIDQLVEEGKMYLFQIYNKDFSEYSKGTPNMHTLYWKALFDERNLADVVYKLNGQAEMFYRKKSIENTHPTHPANHPILNKNKDNKKKESLFEYDLIKDRRYTVDKFMFHVPITMNFKSSGSENINQDVKAYLRHADDMHIIGIDRGERHLLYLVVIDLQGNIKEQFSLNEIVNDYNGNTYHTNYHDLLDVREDERLKARQSWQTIENIKELKEGYLSQVIHKITQLMVRYHAIVVLEDLSKGFMRSRQKVEKQVYQKFEKMLIDKLNYLVDKKTDVSTPGGLLNAYQLTCKSDSSQKLGKQSGFLFYIPAWNTSKIDPVTGFVNLLDTHSLNSKEKIKAFFSKFDAIRYNKDKKWFEFNLDYDKFGKKAEDTRTKWTLCTRGMRIDTFRNKEKNSQWDNQEVDLTTEMKSLLEHYYIDIHGNLKDAISTQTDKAFFTGLLHILKLTLQMRNSITGTETDYLVSPVADENGIFYDSRSCGDQLPENADANGAYNIARKGLMLVEQIKDAEDLDNVKFDISNKAWLNFAQQKPYKNG

SEQ ID NO: 13 - protein, 1306 aa, Unknown
  Description of Unknown: ART13 sequence
MAKNFEDFKRLYSLSKTLRFEAKPIGATLDNIVKSGLLDEDEHRAASYVKVKKLIDEYHKVFIDRVLDDGCLPLENKGNNNSLAEYYESYVSRAQDEDAKKKFKEIQQNLRSVIAKKLTEDKAYANLFGNKLIESYKDKEDKKKIIDSDLIQFINTAESTQLDSMSQDEAKELVKEFWGFVTYFYGFFDNRKNMYTAEEKSTGIAYRLVNENLPKFIDNIEAFNRAITRPEIQENMGVLYSDFSEYLNVESIQEMFQLDYYNMLLTQKQIDVYNAIIGGKTDDEHDVKIKGINEYINLYNQQHKDDKLPKLKALFKQILSDRNAISWLPEEFNSDQEVLNAIKDCYERLAENVLGDKVLKSLLGSLADYSLDGIFIRNDLQLTDISQKMFGNWGVIQNAIMQNIKRVAPARKHKESEEDYEKRIAGIFKKADSFSISYINDCLNEADPNNAYFVENYFATFGAVNTPTMQRENLFALVQNAYTEVAALLHSDYPTVKHLAQDKANVSKIKALLDAIKSLQHFVKPLLGKGDESDKDERFYGELASLWAELDTVTPLYNMIRNYMTRKPYSQKKIKLNFENPQLLGGWDANKEKDYATIILRRNGLYYLAIMDKDSRKLLGKAMPSDGECYEKMVYKFFKDVTTMIPKCSTQLKDVQAYFKVNTDDYVLNSKAFNKPLTITKEVFDLNNVLYGKYKKFQKGYLTATGDNVGYTHAVNVWIKFCMDFLNSYDSTCIYDFSSLKPESYLSLDAFYQDANLLLYKLSFARASVSYINQLVEEGKMYLFQIYNKDFSEYSKGTPNMHTLYWKALFDERNLADVVYKLNGQAEMFYRKKSIENTHPTHPANHPILNKNKDNKKKESLFDYDLIKDRRYTVDKFMFHVPITMNFKSVGSENINQDVKAYLRHADDMHIIGIDRGERHLLYLVVIDLQGNIKEQYSLNEIVNEYNGNTYHTNYHDLLDVREEERLKARQSWQTIENIKELKEGYLSQVIHKITQLMVRYHAIVVLEDLSKGFMRSRQKVEKQVYQKFEKMLIDKLNYLVDKKTDVSTPGGLLNAYQLTCKSDSSQKLGKQSGFLFYIPAWNTSKIDPVTGFVNLLDTHSLNSKEKIKAFFSKFDAIRYNKDKKWFEFNLDYDKFGKKAEDTRTKWTLCTRGMRIDTFRNKEKNSQWDNQEVDLTTEMKSLLEHYYIDIHGNLKDAISAQTDKAFFTGLLHILKLTLQMRNSITGTETDYLVSPVADENGIFYDSRSCGNQLPENADANGAYNIARKGLMLIEQIKNAEDLNNVKFDISNKAWLNFAQQKPYKNG

SEQ ID NO: 14 - protein, 1274 aa, Unknown
  Description of Unknown: ART14 sequence
MAKNFEDFKRLYSLSKTLRFEAKPIGATLDNIVKSDLLDEDEHRAASYVKVKKLIDEYHKVFIDRVLDDGCLPLENKGNNNSLAEYYESYVSRAQDEDAKKKFKEIQQNLRSVIAKKLTEDKAYANLFGNKLIESYKDKEDKKKIIDSDLIQFINTAESTQLDSMSQDEAKELVKEFWGFVTYFYGFFDNRKNMYTAEEKSTGIAYRLVNENLPKFIDNIEAFNRAITRPEIQENMGVLYSDFSEYLNVESIQEMFQLDYYNMLLTQKQIDVYNAIIGGKTDDEHDVKIKGINDYINLYNQKHKDDKLPKLKALFKQILSDRNAISWLPEEFNSDQEVLNAIKDCYERLSENVLGDKVLKSMLGSLADYSLDGIFIRNDLQLTDISQKMFGNWSVIQNAIMQNIKHVAPARKHKESEEEYENRIAGIFKKADSFSISYIDACLNETDPNNAYFVENYFATLGAVDTPTMQRENLFALVQNAYTEITALLHSDYPTEKNLAQDKANVAKIKALLDAIKSLQHFVKPLLGKGDESDKDERFYGELASLWAELDTMTPLYNMIRNYMTRKPYSQKKIKLNFENPQLLGGWDANKEKDYATIILRRNGLYYLAIMNKDSKKLLGKAMPSDGECYEKMVYKLLPGANKMLPKVFFAKSRMEDFKPSKELVEKYYNGTHKKGKNFNIQDCHNLIDYFKQSIDKHEDWSKFGFKFSDTSTYEDLSGFYREVEQQGYKLSFARVSVSYINQLVEEGKMYLFQIYNKDFSEYSKGTPNMHTLYWKALFDERNLADVVYKLNGQAEMFYRKKSIENTHPTHPANHPILNKNKDNKKKESLFGYDLIKDRRYTVDKFLFHVPITMNFKSSGSENINQDVKAYLRHADDMHIIGIDRGERHLLYLVVIDLQGNIKEQFSLNEIVNDYNGNTYHTNYHDLLDVREDERLKARQSWQTIENIKELKEGYLSQVIHKITQLMVKYHAIVVLEDLNMGFMRGRQKVEKQVYQKFEKMLIEKLNYLVDKKADASVSGGLLNAYQLTSKFDSFQKLGKQSGFLFYIPAWNTSKIDPVTGFVNLLDTRYQNVEKAKSFFSKFDAIRYNKDKEWFEFNLDYDKFGKKAEGTRTKWTLCTRGMRIDTFRNKEKNSQWDNQEVDLTAEMKSLLEHYYIDIHSNLKDAISAQTDKAFFTGLLHILKLTLQMRNSITGTETDYLVSPVVDENGIFYDSRSCGDELPENADANGAYNIARKGLMMIEQIKDAKDLDNLKFDISNKAWLNFAQQKPYKNG

SEQ ID NO: 15 - protein, 1251 aa, Unknown
  Description of Unknown: ART15 sequence
MLFQDFTHLYPLSKTVRFELKPIGRTLEHIHAKNFLSQDETMADMYQKVKVILDDYHRDFIADMMGEVKLTKLAEFYDVYLKFRKNPKDDELQKQLKDLQAVLRKESVKPIGNGGKYKAGHDRLFGAKLFKDGKELGDLAKFVIAQEGKSSPKLAHLAHFEKFSTYFTGFHDNRKNMYSDEDKHTAIAYRLIHENLPRFIDNLQILTTIKQKHSALYDQIINELTASGLDVSLASHLDGYHKLLTQEGITAYNRIIGEVNGYTNKHNQICHKSERIAKLRPLHKQILSDGMGVSFLPSKFADDSEMCQAVNEFYRHYADVFAKVQSLFDGFDDHQKDGIYVEHKNLNELSKQAFGDFALLGRVLDGYYVDVVNPEFNERFAKAKTDNAKAKLTKEKDKFIKGVHSLASLEQAIKHHTARHDDESVQAGKLGQYFKHGLAGVDNPIQKIHNNHSTIKGFLERERPAGERALPKIKSGKNPEMTQLRQLKELLDNALNVAHFAKLLMTKTTLDNQDGNFYGEFGVLYDELAKIPTLYNKVRDYLSQKPFSTEKYKLNFGNPTLLNGWDLNKEKDNFGVILQKDGCYYLALLDKAHKKVFDNAPNTGKNVYQKMIYKLLPGPNKMLPRVFFAKSNLDYYNPSAELLDKYAQGTHKKGDNFNLKDCHALIDFFKAGINKHPEWQNFGFKFSPTSSYRDLSDFYREVEPQGYQVKFVDINADYIDELVEQGQLYLFQIYNKDFSPKAHGKPNLHTLYFRALFSEDNLANPIYKLNGEAQIFYRKASLGMNETTIHRAGEILENKNPDNPKERVFTYDIIKDRRYTQDKFMLHVPITMNFGVQGMTIKEFNKKVNQSIRQYDDVNVIGIDRGERHLLYLTVINSKGEILEQRSLNDITTASANGTQMTTPYHKILDKREIERLNARVGWGEIETIKELKSGYLSHVVHQVSQLMLKYNAIVVLEDLNFGFKRGRFKVEKQIYQNFENALIKKLNHLELKDKADDEIGSYKNALQLTNNFTDLKNIGKQTGFLFYVPAWNTSKIDPETGFVDLLKPRYENIAQSQAFFGKFDKICYNADKDYFEFHIDYAKFTDKAKNSRQTWTICSHGDKRYVYDKTANQNKGATKGINVNDELKSLFARYHINEKQPNLVMDICQNNDKEFHKSLMYLLKTLLALRYSNASSDEDFILSPVANDEGVFFNSALADDTQPQNADANGAYHIALKGLWLLNELKNSDDLNKVKLAIDNQTWLNFAQNR

SEQ ID NO: 16 - protein, 1251 aa, Unknown
  Description of Unknown: ART16 sequence
MLFQDFTHLYPLSKTVRFELKPIGKTLEHIHAKNFLSQDETMADMYQKVKAILDDYHRDFITKMMSEVTLTKLPEFYEVYLALRKNPKDDTLQKQLTEIQTALREEVVKPIDSGGKYKAGYERLFGAKLFKDGKELGDLAKFVIAQEGESSPKLPQIAHFEKFSTYFTGFHDNRKNMYSSDDKHTAIAYRLIHENLPRFIDNLQILVTIKQKHSVLYDQIVNELNANGLDVSLASHLDGYHKLLTQEGITAYNRIIGEVNSYTNKHNQICHKSERIAKLRPLHKQILSDGMGVSFLPSKFADDSEMCQAVNEFYRHYAHVFAKVQSLFDRFDDYQKDGIYVEHKNLNELSKQAFGDFALLGRVLDGYYVDVVNPEFNDKFAKAKTDNAKEKLTKEKDKFIKGVHSLASLEQAIEHYIAGHDDESVQAGKLGQYFKHGLAGVDNPIQKIHNSHSTIKGFLERERPAGERTLPKIKSDKSLEMTQLRQLKELLDNALNVVHFAKLLTTKTTLDNQDGNFYGEFGALYDELAKIATLYNKVRDYLSQKPFSTEKYKLNFGNPTLLNGWDLNKEKDNFGVILQKDGCYYLALLDKAHKKVFDNAPNTGKSVYQKMVYKLLPGPNKMLPKVFFAKSNLDYYNPSAELLDKYAQGTHKKGDNFNLKDCHALIDFFKASINKHPEWQHFGFEFSLTSSYQDLSDFYREVEPQGYQVKFVDIDADYIDELVEQGQLYLFQIYNKDFSPKAHGKPNLHTLYFKALFSEDNLANPIYKLNGEAEIFYRKASLDMNETTIHRAGEVLENKNPDNPKERQFVYDIIKDKRYTQDKFMLHVPITMNFGVQGMTIKEFNKKVNQSIQQYDEVNVIGIDRGERHLLYLTVINSKGEILEQRSLNDIITTSANGTQMTTPYHKILDKREIERLNARVGWGEIETIKELKSGYLSHVVHQISQLMLKYNAIVVLEDLNFGFKRGRFKVEKQIYQNFENALIKKLNHLVLKDKADNEIGSYKNALQLTNNFTDLKSIGKQTGFLFYVPAWNTSKIDPVTGFVDLLKPRYENIAQSQAFFDKFDKICYNADKGYFEFHIDYAKFTDKAKNSRQIWTICSHGDKRYVYDKTANQNKGATIGINVNDELKSLFARYRINDKQPNLVMDICQNNDKEFHKSLTYLLKALLALRYSNASSDEDFILSPVANDKGVFFNSALADDTQPQNADANGAYHIALKGLWLLNELKNSDDLDKVKLAIDNQTWLNFAQNR

SEQ ID NO: 17 - protein, 1251 aa, Unknown
  Description of Unknown: ART17 sequence
MLFQDFTHLYPLSKTVRFELKPIGKTLEHIHAKNFLSQDETMADMYQKVKAILDDYHRDFITKMMSEVTLTKLPEFYEVYLALRKNPKDDTLQKQLTEIQTALREEVVKPIDSGGKYKAGYERLFGAKLFKDGKELGDLAKFVIAQEGESSPKLPQIAHFEKFSTYFTGFHDNRKNMYSSDDKHTAIAYRLIHENLPRFIDNLQILVTIKQKHSVLYDQIVNELNANGLDVSLASHLDGYHKLLTQEGITAYNRIIGEVNSYTNKHNQICHKSERIAKLRPLHKQILSDGMGVSFLPSKFADDSEMCQAVNEFYRHYAHVFAKVQSLFDRFDDYQKDGIYVEHKNLNELSKQAFGDFALLGRVLDGYYVDVVNPEFNDKFAKAKTDNAKEKLTKEKDKFIKGVHSLASLEQAIEHYIAGHDDESVQAGKLGQYFKHGLAGVDNPIQKIHNSHSTIKGFLERERPAGERTLPKIKSDKSLEMTQLRQLKELLDNALNVVHFAKLLTTKTTLDNQDGNFYGEFGALYDELAKIATLYNKVRDYLSQKPFSTEKYKLNFGNPTLLNGWDLNKEKDNFGVILQKDGCYYLALLDKAHKKVFDNAPNTGKSVYQKMVYKLLPGSNKMLPKVFFAKSNLDYYNPSAELLDKYAQGTHKKGDNFNLKDCHALIDFFKASINKHPEWQHFGFEFSLTSSYQDLSDFYREVEPQGYQVKFVDIDADYIDELVEQGQLYLFQIYNKDFSPKAHGKPNLHTLYFKALFSEDNLANPIYKLNGEAEIFYRKASLDMNETTIHRAGEVLENKNPDNPKERQFVYDIIKDKRYTQDKFMLHVPITMNFGVQGMTIKEFNKKVNQSIQQYDEVNVIGIDRGERHLLYLTVINSKGEILEQRSLNDIITTSANGTQMTTPYHKILDKREIERLNARVGWGEIETIKELKSGYLSHVVHQISQLMLKYNAIVVLEDLNFGFKRGRFKVEKQIYQNFENALIKKLNHLVLKDKADNEIGSYKNALQLTNNFTDLKSIGKQTGFLFYVPAWNTSKIDPVTGFVDLLKPRYENIAQSQAFFDKFDKICYNADKGYFEFHIDYAKFTDKAKNSRQIWTICSHGDKRYVYDKTANQNKGATIGINVNDELKSLFARYRINDKQPNLVMDICQNNDKEFHKSLTYLLKALLALRYSNASSDEDFILSPVANDKGVFFNSALADDTQPQNADANGAYHIALKGLWLLNELKNSDDLDKVKLAIDNQTWLNFAQNR

SEQ ID NO: 18 - protein, 1257 aa, Unknown
  Description of Unknown: ART18 sequence
MKYTDFTGIYPVSKTLRFELIPQGSTVENMKREGILNNDMHRADSYKEMKKLIDEYHKVFIERCLSDFSLKYDDTGKHDSLEEYFFYYEQKRNDKTKKIFEDIQVALRKQISKRFTGDTAFKRLFKKELIKEDLPSFVKNDPVKTELIKEFSDFTTYFQEFHKNRKNMYTSDAKSTAIAYRIINENLPKFIDNINAFHIVAKVPEMQEHFKTIADELRSHLQVGDDIDKMFNLQFFNKVLTQSQLAVYNAVIGGKSEGNKKIQGINEYVNLYNQQHKKARLPMLKLLYKQILSDRVAISWLQDEFDNDQDMLDTIEAFYNKLDSNETGVLGEGKLKQILMGLDGYNLDGVFLRNDLQLSEVSQRLCGGWNIIKDAMISDLKRSVQKKKKETGADFEERVSKLFSAQNSFSIAYINQCLGQAGIRCKIQDYFACLGAKEGENEAETTPDIFDQIAEAYHGAAPILNARPSSHNLAQDIEKVKAIKALLDALKRLQRFVKPLLGRGDEGDKDSFFYGDFMPIWEVLDQLTPLYNKVRNRMTRKPYSQEKIKLNFENSTLLNGWDLNKEHDNTSVILRREGLYYLGIMNKNYNKIFDANNVETIGDCYEKMIYKLLPGPNKMLPKVFFSKSRVQEFSPSKKILEIWESKSFKKGDNFNLDDCHALIDFYKDSIAKHPDWNKFNFKFSDTQSYTNISDFYRDVNQQGYSLSFTKVSVDYVNRMVDEGKLYLFQIYNKDFSPQSKGTPNMHTLYWRMLFDERNLHNVIYKLNGEAEVFYRKASLRCDRPTHPAHQPITCKNENDSKRVCVFDYDIIKNRRYTVDKFMFHVPITINYKCTGSDNINQQVCDYLRSAGDDTHIIGIDRGERNLLYLVIIDQHGTIKEQFSLNEIVNEYKGNTYCTNYHTLLEEKEAGNKKARQDWQTIESIKELKEGYLSQVIHKISMLMQRYHAIVVLEDLNGSFMRSRQKVEKQVYQKFEHMLINKLNYLVNKQYDAAEPGGLLHALQLTSRMDSFKKLGKQSGFLFYIPAWNTSKIDPVTGFVNLFDTRYCNEAKAKEFFEKFDDISYNDERDWFEFSFDYRHFTNKPTGTRTQWTLCTQGTRVRTFRNPEKSNHWDNEEFDLTQAFKDLFNKYGIDIASGLKARIVNGQLTKETSAVKDFYESLLKLLKLTLQMRNSVTGTDIDYLVSPVADKDGIFFDSRTCGSLLPANADANGAFNIARKGLMLLRQIQQSSIDAEKIQLAPIKNEDWLEFAQEKPYL

SEQ ID NO: 19 - protein, 1245 aa, Unknown
  Description of Unknown: ART19 sequence
METFSGFTNLYPLSKTLRFRLIPVGETLKYFIGSGILEEDQHRAESYVKVKAIIDDYHRAYIENSLSGFELPLESTGKFNSLEEYYLYHNIRNKTEEIQNLSSKVRTNLRKQVVAQLTKNEIFKRIDKKELIQSDLIDFVKNEPDANEKIALISEFRNFTVYFKGFHENRRNMYSDEEKSTSIAFRLIHENLPKFIDNMEVFAKIQNTSISENFDAIQKELCPELVTLCEMFKLGYFNKTLSQKQIDAYNTVIGGKTTSEGKKIKGLNEYINLYNQQHKQEKLPKMKLLFKQILSDRESASWLPEKFENDSQVVGAIVNFWNTIHDTVLAEGGLKTIIASLGSYGLEGIFLKNDLQLTDISQKATGSWGKISSEIKQKIEVMNPQKKKESYETYQERIDKIFKSYKSFSLAFINECLRGEYKIEDYFLKLGAVNSSSLQKENHFSHILNTYTDVKEVIGFYSESTDTKLIRDNGSIQKIKLFLDAVKDLQAYVKPLLGNGDETGKDERFYGDLIEYWSLLDLITPLYNMVRNYVTQKPYSVDKIKINFQNPTLLNGWDLNKETDNTSVILRRDGKYYLAIMNNKSRKVFLKYPSGTDRNCYEKMEYKLLPGANKMLPKVFFSKSRINEFMPNERLLSNYEKGTHKKSGTCFSLDDCHTLIDFFKKSLDKHEDWKNFGFKFSDTSTYEDMSGFYKEVENQGYKLSFKPIDATYVDQLVDEGKIFLFQIYNKDFSEHSKGTPNMHTLYWKMLFDETNLGDVVYKLNGEAEVFFRKASINVSHPTHPANIPIKKKNLKHKDEERILKYDLIKDKRYTVDQFQFHVPITMNFKADGNGNINQKAIDYLRSASDTHIIGIDRGERNLLYLVVIDGNGKICEQFSLNEIEVEYNGEKYSTNYHDLLNVKENERKQARQSWQSIANIKDLKEGYLSQVIHKISELMVKYNAIVVLEDLNAGFMRGRQKVEKQVYQKFEKKLIEKLNYLVFKKQSSDLPGGLMHAYQLANKFESFNTLGKQSGFLFYIPAWNTSKMDPVTGFVNLFDVKYESVDKAKSFFSKFDSIRYNVERDMFEWKFNYGEFTKKAEGTKTDWTVCSYGNRIITFRNPDKNSQWDNKEINLTENIKLLFERFGIDLSSNLKDEIMQRTEKEFFIELISLFKLVLQMRNSWTGTDIDYLVSPVCNENGEFFDSRNVDETLPQNADANGAYNIARKGMILLDKIKKSNGEKKLALSITNREWLSFAQGCCKNG

SEQ ID NO: 20 - protein, 1245 aa, Unknown
  Description of Unknown: ART20 sequence
METFSGFTNLYPLSKTLRFRLIPVGETLKHFIDSGILEEDQHRAESYVKVKAIIDDYHRAYIENSLSGFELPLESTGKFNSLEEYYLYHNIRNKTEEIQNLSSKVRTNLRKQVVVQLTKNEIFKRIDKKELIQSDLIDFVKNEPDANEKIALISEFRNFTVYFKGFHENRRNMYSDEEKSTSIAFRLIHENLPKFIDNMEVFAKIQNTSISENFDAIQKELCPELVTLCEMFKLGYFNKTLSQKQIDAYNTVIGGKTTSEGKKIKGLNEYINLYNQQHKQEKLPKMKLLFKQILSDRESASWLPEKFENDSQVVGAMVNFWNTIHDTVLAEGGLKTIIASLGSYGLEGIFLKNDLQLTDISQKATGSWSKISSEIKQKIEVMNPQKKKESYESYQERIDKLFKSYKSFSLAFINECLRGEYKIEDYFLKLGAVNSSSLQKENHFSHILNAYTDVKEAIGFYSESTDTKLIQDNDSIQKIKQFLDAVKDLQAYVKPLLGNGDETGKDERFYGDLIEYWSLLDLITPLYNMVRNYVTQKPYSVDKIKINFQNPTLLNGWDLNKETDNTSVILRRDGKYYLAIMNNKSRKVFLKYPSGTDGNCYEKMEYKLLPGANKMLPKVFFSKSRINEFMPNERLLSNYEKGTHKKSGICFSLDDCHTLIDFFKKSLDKHEDWKNFGFKFSDTSTYEDMSGFYKEVENQGYKLSFKPIDATYVDQLVDEGKIFLFQIYNKDFSEHSKGTPNMHTLYWKMLFDETNLGDVVYKLNGEAEVFFRKASINVSHPTHPANIPIKKKNLKHKDEERILKYDLIKDKRYTVDQFQFHVPITMNFKADGNGNINQKAIDYLCSASDTHIIGIDRGERNLLYLVVIDGNGKICEQFSLNEIEVEYNGEKYSTNYHDLLNVKENERKQARQSWQSIANIKDLKEGYLSQVIHKISELMVKYNAIVVLEDLNAGFMRGRQKVEKQVYQKFEKKLIEKLNYLVFKKQSSDLPGGLMHAYQLANKFESFNALGKQSGFLFYIPAWNTSKMDPVTGFVNLFDVKYESVDKAKSFFSKFDSMRYNVERDMFEWKFNYGEFTKKAEGTKTDWTVCSYGNRIITFRNPDKNSQWDNKEINLTENIKLLFERFGIDLSSNLKDEIMQRTEKEFFIELISLFKLVLQMRNSWTGTDIDYLVSPVCNENGEFFDSRNVDETLPQNADANGAYNIARKGMILLDKIKKSNGEKKLALSITNREWLSFAQGCCKNG

SEQ ID NO: 21 - protein, 1245 aa, Unknown
  Description of Unknown: ART21 sequence
METFSGFTNLYPLSKTLRFRLIPVGETLKHFIGSGILEEDQHRAESYVKVKAIIDDYHRTYIENSLSGFELPLESTGKFNSLEEYYLYHNIRNKTEEIQNLSSKVRTNLRKQVVTQLTKNEIFKRIDKKELIQSDLIDFVKNEPDANEKIALISEFRNFTVYFKGFHENRRNMYSDEEKSTSIAFRLIHENLPKFIDNMEVFAKIQNTSISENFDAIQKELCPELVTLCEMFKLGYFNKTLSQKQIDAYNTVIGGKTTSEGKKIKGLNEYINLYNQQHKQEKLPKMKLLFKQILSDRESASWLLEKFENDSQVVGAMVNFWNTIHDTVLAEGGLKTIIASLGSYGLEGIFLKNDLQLTDISQKATGSWSKISSEIKQKIEAMNPQKKKESYESYQERIDKLFKSYKSFSLAFVNECLRGEYKIEDYFLKLGAVNSSLLQKENHFSHILNTYTDVKEVIGFYSESTDTKLIQDNDSIQKIKQFLDAVKDLQAYVKPLLGNSDETGKDERFYGDLIEYWSLLDLITPLYNMVRNYVTQKPYSVDKIKINFQNPTLLNGWDLNKEMDNTSVILRRDGKYYLAIMNNKSRKVFLKYPSGTDRNCYEKMEYKLLPGANKMLPKVFFSKSRINEFMPNERLLSNYEKGTHKKSGTCFSLDDCHTLIDFFKKSLNKHEDWKNFGFKFSDTSTYEDMSGFYKEVENQGYKLSFKPIDATYVDQLVDEGKIFLFQIYNKDFSEHSKGTPNMHTLYWKMLFDETNLGDVVYKLNGEAEVFFRKASINVSHPTHPANIPIKKKNLKHKDEERILKYDLIKDKRYTVDQFQFHVPITMNFKANGNGNINQKAIDYLRSASDTHIIGIDRGERNLLYLVVIDGNGKICEQFSLNEIEVEYNGEKYSTNYHDLLNVKENERKQARQSWQSIANIKDLKEGYLSQVIHKISELMVKYNAIVVLEDLNAGFMRGRQKVEKQVYQKFEKKLIEKLNYLVFKKQSSDLPGGLMHAYQLANKFESFNTLGKQSGFLFYIPAWNTSKMDPVTGFVNLFDVKYESVDKAKSFFSKFDSIRYNVERDMFEWKFNYDEFTKKAEGTKTDWTVCSYGNRIITFRNPDKNSQWDNKEINLTENIKLLFERFGIDLSSNLKDEIMERTEKEFFIELISLFKLVLQMRNSWTGTDIDYLVSPVCNENGEFFDSRNVDETLPQNADANGAYNIARKGMILLDKIKKNNGEKKLTLSITNREWLSFAQGCCKNG

SEQ ID NO: 22 - protein, 1261 aa, Unknown
  Description of Unknown: ART22 sequence
MLFQDFTHLYPLSKTVRFELKPIGKTLEHIHAKNFLSQDKTMADMYQKVKAILDDYHRDFIADMMGEVKLTKLAEFCDVYLKFRKNPKDDGLQKQLKDLQAVLRKEIVKPIGNGGKYKVGYDRLFGAKLFKDGKELGDLAKFVIAQESESSPKLPQIAHFEKFSTYFTGFHDNRKNMYSSDDKHTAIAYRLIHENLPRFIDNLQILATIKQKHSALYDQIASELTASGLDVSLASHLGGYHKLLTQEGITAYNRIIGEVNSYTNKHNQICHKSERIAKLRPLHKQILSDGMGVSFLPSKFADDSEMCQAVNEFYRHYADVFAKVQSLFDRFDDYQKDGIYVEHKNLNELSKRAFGDFGFLKRFLEEYYADVIDPEFNEKFAKTEPDSDEQKKLAGEKDKFVKGVHSLASLEQVIEYYTAGYDDESVQADKLGQYFKHRLAGVDNPIQKIHNSHSTIKGFLERERPAGERALPKIKSDKSPEMTQLRQLKELLDNALNVVHFAKLVSTETVLDTRSDKFYGEFRPLYVELAKITTLYNKVRDYLSQKPFSTEKYKLNFGNPTLLNGWDLNKEKDNFGVILQKDGCYYLALLDKAHKKVFDNAPNTGKSVYQKMVYKQIANARRDLACLLIINGKVVRKTKGLDDLREKYLPYDIYKIYQSESYKVLSPNFNHQDLVKYIDYNKILASGYFEYFDFRFKESSEYKSYKEFLDDVDNCGYKISFCNINADYIDELVEQGQLYLFQIYNKDFSPKAHGKPNLHTLYFKALFSEDNLANPIYKLNGEAQIFYRKASLDMNETTIHRAGEVLENKNPDNPKQRQFVYDIIKDKRYTQDKFMLHVPITMNFGVQGMTIEGFNKKVNQSIQQYDDVNVIGIDRGERHLLYLTVINSKGEILEQRSLNDIITTSANGTQMTTPYHKILNKKKEGRLQARKDWGEIETIKELKAGYLSHVVHQISQLMLKYNAIVVLEDLNFGFKRGRLKVENQVYQNFENALIKKLNHLVLKDKTDDEIGSYKNALQLTNNFTDLKSIGKQTGFLFYVPARNTSKIDPETGFVDLLKPRYENITQSQAFFGKFDKICYNTDKGYFEFHIDYAKFTDEAKNSRQTWVICSHGDKRYVYNKTANQNKGATKGINVNDELKSLFACHHINDKQPNLVMDICQNNDKEFHKSLMYLLKALLALRYSNANSDEDFILSPVANDEGVFFNSALADDTQPQNADANGAYHIALKGLWVLEQIKNSDDLDKVDLEIKDDEWRNFAQNR

SEQ ID NO: 23 - protein, 1275 aa, Unknown
  Description of Unknown: ART23 sequence
MGKNQNFQEFIGVSPLQKTLRNELIPTETTKKNITQLDLLTEDEIRAQNREKLKEMMDDYYRDVIDSTLHAGIAVDWSYLFSCMRNHLRENSKESKRELERTQDSIRSQIYNKFAERADFKDMFGASIITKLLPTYIKQNPEYSERYDESMEILKLYGKFTTSLTDYFETRKNIFSKEKISSAVGYRIVEENAEIFLQNQNAYDRICKIAGLDLHGLDNEITAYVDGKTLKEVCSDEGFAKAITQEGIDRYNEAIGAVNQYMNLLCQKNKALKPGQFKMKRLHKQILCKGTTSFDIPKKFENDKQVYDAVNSFTEIVMKNNDLKRLLNITQNVNDYDMNKIYVAADAYSTISQFISKKWNLIEECLLDYYSDNLPGKGNAKENKVKKAVKEETYRSVSQLNELIEKYYVEKTGQSVWKVESYISRLAETITLELCHEIENDEKHNLIEDDDKISKIKELLDMYMDAFHIIKVFRVNEVLNFDETFYSEMDEIYQDMQEIVPLYNHVRNYVTQKPYKQEKYRLYFNTPTLANGWSKNKEYDNNAIILMRDDKYYLGILNAKKKPSKQTMAGKEDCLEHAYAKMNYYLLPGANKMLPKVFLSKKGIQDYHPSSYIVEGYNEKKHIKGSKNFDIRFCRDLIDYFKECIKKHPDWNKFNFEFSATETYEDISVFYREVEKQGYRVEWTYINSEDIQKLEEDGQLFLFQIYNKDFAVGSTGKPNLHTLYLKNLFSEENLRDIVLKLNGEAEIFFRKSSVQKPVIHKCGSILVNRTYEITESGTTRVQSIPESEYMELYRYFNSEKQIELSDEAKKYLDKVQCNKAKTDIVKDYRYTMDKFFIHLPITINFKVDKGNNVNAIAQQYIAEQEDLHVIGIDRGERNLIYVSVIDMYGRILEQKSFNLVEQVSSQGTKRYYDYKEKLQNREEERDKARKSWKTIGKIKELKEGYLSSVIHEIAQMVVKYNAIIAMEDLNYGFKRGRFKVERQVYQKFETMLISKLNYLADKSQAVDEPGGILRGYQMTYVPDNIKNVGRQCGIIFYVPAAYTSKIDPTTGFINAFKRDVVSTNDAKENFLMKFDSIQYDIEKGLFKFSFDYKNFATHKLTLAKTKWDVYTNGTRIQNMKVEGHWLSMEVELTTKMKELLDDSHIPYEEGQNILDDLREMKDITTIVNGILEIFWLTVQLRNSRIDNPDYDRIISPVLNNDGEFFDSDEYNSYIDAQKAPLPIDADANGAFCIALKGMYTANQIKENWVEGEKLPADCLKIEHASWLAFMQGERG

SEQ ID NO: 24 - protein, 1261 aa, Unknown
  Description of Unknown: ART24 sequence
MNTSLFSSFTRQYPVTKTLRFELKPMGATLGHIQQKGFLHKDEELAKIYKKIKELLDEYHRAFIADTLGDAQLVGLDDFYADYQALKQDSKNSHLKDKLTKTQDNLRKQITKNFEKTPQLKERYKRLFTKELFKAGKDKGDLEKWLINHDSEPNKAEKISWIHQFENFTTYFQGFYENRKNMYSDEVKHTAIAYRLIHENLPRFVDNIQVLSKIKSDYPDLYHELNHLDSRTIDFADFKFDDMLQMDFYHHLLIQSGITAYNTLLGGKVLEGGKKLQGINELINLYGQKHKIKIAKLKPLHKQILSDGQSVSFLPKKFDNDYELCQTVNHFYREYVAIFDELVVLFQKFYDYDKDNIYINHQQLNQLSHELFADFRLLSRALDFYYCQIIDGDFNNKINNAKSQNAKEKLLKEKERYTKSNHSINELQKAINHYASHHEDTEVKVISDYFSATNIRNMIDGIHHHFSTIKGFLEKDNNQGESYLPKQKNSNDVKNLKLFLDGVLRLIHFIKPLALKSDDTLEKEEHFYGEFMPLYDKLVMFTLLYNKVRDYISQKPYNDEKIKLNFGNSTLLNGWDVNKEKDNFGVILCKEGLYYLAILDKSHKKVFDNAPKATSSHTYQKMVYKLLPGPNKMLPKVFFAKSNIGYYQPSAQLLENYEKGTHKKGSNFSLTDCHHLIDFFKSSIAKHPEWKEFGFRFSDTHTYQDLSDFYKEIEPQSYKVKFIDIDADYIDDLVEKGQLYLFQLYNKDFSKQSYGKPNLHTLYFKSLFSDDNLKNPIYKLNGEAEIFYRRASLSVSDTTIHQAGEILTPKNPNNTHNRTLSYDVIKNKRYTTDKFFLHIPITMNFGIENTGFKAFNHQVNTTLKNADKKDVHIIGIDRGERHLLYVSVIDGDGRIVEQRTLNDIVSISNNGMSMSTPYHQILDNREKERLAARTDWGDIKNIKELKAGYLSHVVHEVVQMMLKYNAMIVLEDLNFGFKHGRFKVEKQVYQNFENALIKKLNYLVLKNADNHQLGSVRKALQLTNNFTDIKSIGKQTGFIFYVPAWNTSKIDPTTGFVDLLKPRYENMAQAQSFISRFKKIAYNHQLDYFEFEFDYADFYQKTIDKKRIWTLCTYGDVRYYYDHKTKETKTVNITKELKSLLDKHDLSYQNGHNLVDELANSHDKSLLSGVMYLLKVLLALRYSHAQKNEDFILSPVMNKDGVFFDSRFADDVLPNNADANGAYHIALKGLWVLNQIQSADNMDKIDLSISNEQWLHFTQSR

SEQ ID NO: 25 - protein, 1288 aa, Unknown
  Description of Unknown: ART25 sequence
MVGNKISNSFDSFTGINALSKTLRNELIPSDYTKRHIAESDFIAADTNKNEDQYVAKEMMDDYYRDFISKVLDNLHDIEWKNLFELMHKAKIDKSDATSKELIKIQDMLRKKIGKKFSQDPEYKVMLSAGMITKILPKYILEKYETDREDRLEAIKRFYGFTVYFKEFWASRQNVFSDKAIASSISYRIIHENAKIYMDNLDAYNRIKQIACEEIEKIEEEAYDFLQGDQLDVVYTEEAYGRFISQSGIDLYNNICGVINAHMNLYCQSKKCSRSKFKMQKLHKQILCKAETGFEIPLGFQDDAQVINAINSFNALIKEKNIISRLRTIGKSISLYDVNKIYISSKAFENVSVYIDHKWDVIASSLYKYFSEIVKGNKDNREEKIQKEIKKVKSCSLGDLQRLVNSYYKIDSTCLEHEVTEFVTKIIDEIDNFQITDFKFNDKISLIQNEQIVMDIKTYLDKYMSIYHWMKSFVIDELVDKDMEFYSELDELNEDMSEIVNLYNKVRNYVTQKPYSQEKIKLNFGSPTLADGWSKSKEFDNNAIILIRDEKIYLAIFNPRNKPAKTVISGHDVCNSETDYKKMNYYLLPGASKTLPHVFIKSRLWNESHGIPDEILRGYELGKHLKSSVNFDVEFCWKLIDYYKECISCYPNYKAYNFKFADTESYNDISEFYREVECQGYKIDWTYISSEDVEQLDRDGQIYLFQIYNKDFAPNSKGMDNLHTKYLKNIFSEDNLKNIVIKLNGEAELFYRKSSVKKKVEHKKGTILVNKTYKVEDNTENSKEKRVIIESVPDDCYMELVDYWRNGGIGILSDKAVQYKDKVSHYEATMDIVKDRRYTVDKFFIHLPITINFKADGRININEKVLKYIAENDELHVIGIDRGERNLLYVSVINKKGKIVEQKSFNMIESYETVTNIVRRYNYKDKLVNKESARTDARKNWKEIGKIKEIKEGYLSQVIHEISKMVLKYNAIIVMEDLNYGFKRGRFRVERQVYQKFENMLISKLAYLVDKSRKADEPGGVLRGYQLTYIPDSLEKLGSQCGIIFYVPAAYTSKIDPLTGFVNVFNFREYSNFETKLDFVRSLDSIRYDTEKKLFSISFDYDNFKTHNTTLAKTKWVIYLRGERIKKEHTSYGWKDDVWNVESRIKDLFDSSHMKYDDGHNLIEDILELESSVQKKLINELIEIIRLTVQLRNSKSERYDRTEAEYDRIVSPVMDENGRFYDSENYIFNEETELPKDADANGAYCIALKGLYNVIAIKNNWKEGEKFNRKLLSLNNYNWFDFIQNRRF

SEQ ID NO: 26 - protein, 1876 aa, Unknown
  Description of Unknown: ART26 sequence
MVGNKISNSFDSFTGINALSKTLRNELIPSDYTKRHIAESDFIAADTNKNEDQYVAKEMMDDYYRDFISKVLDNLHDIEWKNLFELMHKAKIDKSDATSKELIKIQDMLRKKIGKKFSQDPEYKVMLSAGMITKILPKYILEKYETDREDRLEAIKRFYGFTVYFKEFWASRQNVFSDKAIASSISYRIIHENAKIYMDNLDAYNRIKQIACEEIEKIEEEAYDFLQGDQLDVVYTEEAYGRFISQSGIDLYNNICGVINAHMNLYCQSKKCSRSKFKMQKLHKQILCKAETGFEIPLGFQDDAQVINAINSFNALIKEKNIISRLRTIGKSISLYDVNKIYISSKAFENVSVYIDHKWDVIASSLYKYFSEIVKGNKDNREEKIQKEIKKVKSCSLGDLQRLVNSYYKIDSTCLEHEVTEFVTKIIDEIDNFQITDFKFNDKISLIQNEQIVMDIKTYLDKYMSIYHWMKSFVIDELVDKDMEFYSELDELNEDMSEIVNLYNKVRNYVTQKPYSQEKIKLNFGSPTLADGWSKSKEFDNNAIILIRDEKIYLAIFNPRNKPAKTVISGHDVCNSETDYKKMNYYLLPGASKTLPHVFIKSRLWNESHGIPDEILRGYELGKHLKSSVNFDVEFCWKLIDYYKECISCYPNYKAYNFKFADTESYNDISEFYREVECQGYKIDWTYISSEDVEQLDRDGQIYLFQIYNKDFAPNSKGMDNLHTKYLKNIFSEDNLKNIVIKLNGEAELFYRKSSVKKKVEHKKGTILVNKTYKVEDNTENSKEKRVIIESVPDDCYMELVDYWRNGGIGILSDKAVQYKDKVSHYEATMDIVKDRRYTVDKFFIHLPITINFKADGRININEKVLKYIAENDELHVIGIDRGERNLLYVSVINKKGKIVEQKSFNMIESYETVTNIVRRYNYKDKLVNKESARTDARKNWKEIGKIKEIKEGYLSQVIHEISKMVLKYNAIIVMEDLNYGFKRGRFRVERQVYQKFENMLISKLAYLVDKSRKADEPGGVLRGYQLTYIPDSLEKLGSQCGIIFYVPAAYTSKIDPLTGFVNVFNFREYSNFETKLDFVRSLDSIRYDTEKKLFSISFDYDNFKTHNTTLAKTKWVIYLRGERIKKEHTSYGWKDDVWNVESRIKDLFDSSHMKYDDGHNLIEDILELESSVQKKLINELIEIIRLTVQLRNSKSERYDRTEAEYDRIVSPVMDENGRFYDSENYIFNEETELPKDADANGAYCIALKGLYNVIAIKNNWKEGEKFNRKLLSLNNYNWFDFIQNRRFQIYLFQIYNKDFAPNSKGMDNLHTKYLKNIFSEDNLKNIVIKLNGEAELFYRKSSVKKKVEHKKGTILVNKTYKVEDNTENSKEKRVIIESVPDDCYMELVDYWRNGGIGILSDKAVQYKDKVSHYEATMDIVKDRRYTVDKFFIHLPITINFKADGRININEKVLKYIAENDELHVIGIDRGERNLLYVSVINKKGKIVEQKSFNMIESYETVTNIVRRYNYKDKLVNKESARTDARKNWKEIGKIKEIKEGYLSQVIHEISKMVLKYNAIIVMEDLNYGFKRGRFRVERQVYQKFENMLISKLAYLVDKSRKADEPGGVLRGYQLTYIPDSLEKLGSQCGIIFYVPAAYTSKIDPLTGFVNVFNFREYSNFETKLDFVRSLDSIRYDTEKRLFSISFDYDNFKTHNTTLAKTKWVIYLRGERIKKEHTSYGWKDDVWNVESRIKDLFDSSHMKYDDGHNLIEDILELESSVQKKLINELIEIIRLTVQLRNSKSERYDRTEAEYDRIVSPVMDEKGRFYDSENYIFNEETELPKDADANGAYCIALKGLYNVIAIKNNWKEGEKFNRKLLSLNNYNWFDFIQNRRF

SEQ ID NO: 27 - protein, 1245 aa, Unknown
  Description of Unknown: ART27 sequence
MQEHKKISHLTHRNSVQKTIRMQLNPVGKTMDYFQAKQILENDEKLKEDYQKIKEIADRFYRNLNEDVLSKTGLDKLKDYAEIYYHCNTDADRKRLDECASELRKEIVKNFKNRDEYNKLFNKKMIEIVLPQHLKNEDEKEVVASFKNFTTYFTGFFTNRKNMYSDGEESTAIAYRCINENLPKHLDNVKAFEKAISKLSKNAVDDLDTTYSGLCGTNLYDVFTVDYFNFLLPQSGITEYNKIIGGYTTSDGTKVKGINEYINLYNQQVSKRYKIPNLKILYKQILSESEKVSFIPPKFEDDNELLSAVSEFYANDETFDGMPLKKAIDETKLLFGNLDNSSLNGIYIQNDRSVTNLSNSMFGSWSVIEDLWNKNYDSVNSNSRIKDIQKREDKRKKAYKAEKKLSLSFLQVLISNSENDEIREKSIVDYYKTSLMQLTDNLSDKYKEAAPLFNESYANEKGLKNDDKSISLIKNFLDAIKEIEKFIKPLSETNITGEKNDLFYSQFTPLLDNISRIDILYDKVRNYVTQKPFSTDKIKLNFGNSQLLNGWDRNKEKDCGAVWLCKDEKYYLAIIDKSNNSILENIDFQDCDESDCYEKIIYKLLPGPNKMLPKVFFSEKCKKLLSPSDEILKIRKNGTFKKGDKFSLDDCHKLIDFYKESFKKYPNWLIYNFKFKKTNEYNDISEFYNDVASQGYNISKMKIPTSFIDKLVDEGKIYLFQLYNKDFSPHSKGTPNLHTLYFKMLFDERNLEDVVYKLNGEAEMFYRPASIKYDKPTHPKNTPIKNKNTLNDKRASTFPYDLIKDKRYTKWQFSLHFPITMNFKAPDRAMINDDVRNLLKSCNNNFIIGIDRGERNLLYVSIIDSNGAIIYQHSLNIIGNKFKGKTYETNYREKLETREKERTEQRRNWKAIESIKELKEGYISQAVHVICQLVVKYDAIIVMEKLTDGFKRGRTKFEKQVYQKFEKMLIDKLNYYVDKKLDPDEEGGLLHAYQLTNKLESFDKLGMQSGFIFYVRPDFTSKIDPVTGFVNLLYPRYENIDKAKDMISRFDDIRYNAGEDFFEFDIDYDKFPKTASDYRKKWTICTNGERIEAFRNPASNNEWSYRTIILAEKFKELFDNNSINYRDSDNLKAEILSQTKGKFFEDFFKLLRLTLQMRNSNPETGEDRILSPVKDKNGNFYDSSKYDEKSNLPCDADANGAYNIARKGLWIVEQFKKSDNVSTVEPVIHNDKWLKFVQENDMANN

SEQ ID NO: 28 - protein, 1271 aa, Unknown
  Description of Unknown: ART28 sequence
MKNLANFTNLYSLQKTLRFELKPIGKTLDWIIKKDLLKQDEILAEDYKIVKKIIDRYHKDFIDLAFESAYLQKKSSDSFTAIMEASIQSYSELYFIKEKSDRDKKAMEEISGIMRKEIVECFTGKYSEVVKKKFGNLFKKELIKEDLLNFCEPDELPIIQKFADFTTYFTGFHENRENMYSNEEKATAIANRLIRENLPRYLDNLRIIRSIQGRYKDFGWKDLESNLKRIDKNLQYSDFLTENGFVYTFSQKGIDRYNLILGGQSVESGEKIQGLNELINLYRQKNQLDRRQLPNLKELYKQILSDRTRHSFVPEKFSSDKALLRSLLDFHKEVIQNKNLFEEKQVSLLQAIRETLTDLKSFDLDRIYLTNDTSLTQISNFVFGDWSKVKTILAIYFDENIANPKDRQRQSNSYLKAKENWLKKNYYSIHELNEAISVYGKHSDEELPNTKIEDYFSGLQTKDETKKPIDVLDAIVSKYADLESLLTKEYPEDKNLKSDKGSIEKIKNYLDSIKLLQNFLKPLKPKKVQDEKDLGFYNDLELYLESLESANSLYNKVRNYLTGKEYSDEKIKLNFKNSTLLDGWDENKETSNLSVIFRDTNNYYLGILDKQNNRIFESIPEIQSGEETIQKMVYKLLPGANNMLPKVFFSEKGLLKFNPSDEITSLYSEGRFKKGDKFSINSLHTLIDFYKKSLAVHEDWSVFNFKFDETSHYEDISQFYRQVESQGYKITFKPISKKYIDTLVEDGKLYLFQIYNKDFSQNKKGGGKPNLHTIYFKSLFEKENLKDVIVKLNGQAEVFFRKKSIHYDENITRYGHHSELLKGRFSYPILKDKRFTEDKFQFHFPITLNFKSGEIKQFNARVNSYLKHNKDVKIIGIDRGERHLLYLSLIDQDGKILRQESLNLIKNDQNFKAINYQEKLHKKEIERDQARKSWGSIENIKELKEGYLSQVVHTISKLMVEHNAIVVLEDLNFGFKRGRQKVERQVYQKFEKMLIEKLNFLVFKDKEMDEPGGILKAYQLTDNFVSFEKMGKQTGFVFYVPAWNTSKIDPKTGFVNFLHLNYENVNQAKELIGKFDQIRYNQDRDWFEFQVTTDQFFTKENAPDTRTWIICSTPTKRFYSKRTVNGSVSTIEIDVNQKLKELFNDCNYQDGEDLVDRILEKDSKDFFSKLIAYLRILTSLRQNNGEQGFEERDFILSPVVGSDGKFFNSLDASSQEPKDADANGAYHIALKGLMNLHVINETDDESLGKPSWKISNKDWLNFVWQRPSLKA

SEQ ID NO: 29 - protein, 1245 aa, Unknown
  Description of Unknown: ART29 sequence
MQEHKKISHLTHRNSVQKTIRMQLNPVGKTMDYFQAKQILENDEKLKENYQKIKEIADRFYRNLNEDVLSKTRLDKLKDYTDIYYHCNTDADRKRLDECASELRKEIVKNFKNRDEYNKLFNKKMIEIVLPKHLKNEDEKEVVTSFKNFTTYFTGFFTNRKNMYSDGEESTAIAYRCINENLPKHLDNVKAFEKAISKLSKNAIDDLDTTYSGLCGTNLYDVFTVDYFNFLLPQSGITEYNKIIGGYTTNDGTKVKGINEYINLYNQQVSKRDKIPNLKILYKQILSESEKVSFIPPKFEDDNELLSAVSEFYANDETFDGMPLKKAIDETKLLFGNLDNPSLNGIYIQNDRSVTNLSNSMFGSWSVIEDLWNKNYDSVNSNSRIKDIQKREDKRKKAYKAEKKLSLSFLQVLISNSENDEIREKSIVDYYKTSLMQLTDNLSDKYNEAAPLLNENYSNEKGLKNDDKSISLIKNFLDAIKEIEKFIKPLSETNITGEKNDLFYSQFTPLLDNISRIDILYDKVRNYVTQKPFSTDKIKLNFGNSQLLNGWDRNKEKDCGAVWLCKDEKYYLAIIDKSNNSILENIDFQDCDESDCYEKIIYKLLPGPNKMLPKVFFSEKCKKLLSPSDEILKIYKSGTFKTGDKFSLDDCHKLIDFYKESFKKYPNWLIYNFKFKKTNEYNDIREFYNDVALQGYNISKMKIPTSFIDKLVDEGKIYLFQLYNKDFSPHSKGTPNLHTLYFKMLFDERNLEDVVYRLNGEAEMFYRPASIKYDKPTHPKNTPIKNKNTLNDKKTSTFPYDLIKDKRYTKWQFSLHFPITMNFKAPDKAMINDDVRNLLKSCNNNFIIGIDRGERNLLYVSVIDSNGAIIYQHSLNIIGNKFKEKTYETNYREKLATREKERTEQRRNWKAIESIKELKEGYISQAVHVICQLVVKYDAIIVMEKLTDGFKRGRTKFEKQVYQKFEKMLIDKLNYYVDKKLDPDEEGGLLHAYQLTNKLESFDKLGMQSGFIFYVRPDFTSKIDPVTGFVNLLYPQYENIDKAKDMISRFDEIRYNAGEDFFEFDIDYDEFPKTASDYRKKWTICTNGERIEAFRNPANNNEWSYRTIILAEKFKELFDNNSINYRDSDDLKAEILSQTKGKFFEDFFKLLRLTLQMRNSNPETGEDRILSPVKDKNGNFYDSSKYDEKSKLPCDADANGAYNIARKGLWIVEQFKKADNVSTVEPVIHNDQWLKFVQENDMANN

SEQ ID NO: 30 - protein, 1245 aa, Unknown
  Description of Unknown: ART30 sequence
MQEHKKISHLTHRNSVQKTIRMQLNPVGKTMDYFQAKQILENDEKLKEDYQKIKEIADRFYRNLNEDVLSKTGLDKLKDYADIYYHCNTDADRKRLNECASELRKEIVKNFKNRDEYNKLFNKKMIEIVLPKHLKNEDEKEVVASFKNFTTYFTGFFTNRKNMYSDGEESTAIAYRCINENLPKHLDNVKVFEKAISKLSKNAIDDLGATYSGLCGTNLYDVFTVDYFNFLLPQSGITEYNKIIGGYTTSDGTKVKGINEYINLYNQQVSKRDKIPNLKILYKQILSESEKVSFIPPKFEDDNELLSAVSEFYANDETFDGMPLKKAIDETKLLFGNLDNSSLNGIYIQNDRSVTNLSNSMFGSWSVIEDLWNKNYDSVNSNSRIKDIQKREDKRKKAYKAEKKLSLSFLQVLISNSENDEIREKSIVDYYKTSLMQLTDNLSDKYKEAAPLFSENYDNEKGLKNDDKSISLIKNFLDAIKEIEKFIKPLSETNITGEKNDLFYSQFTPLLDNISRIDILYDKVRNYVTQKPFSTDKIKLNFGNSQLLNGWDKDKEREYGAVLLCKDEKYYLAIIDKSNNSILENIDFQDCNESDYYEKIVYKLLTKINGNLPRVFFSEKRKKLLSPSDEILKIYKSGTFKKGDKFSLDDCHKLIDFYKESFKKYPNWLIYNFKFKNTNEYNDISEFYNDVASQGYNISKMKIPTTFIDKLVDEGKIYLFQLYNKDFSPHSKGTPNLHTLYFKMLFDERNLEDVVYKLNGEAEMFYRPASIKYDKPTHPKNTPIKNKNTLNDKKASTFPYDLIKDKRYTKWQFSLHFPITMNFKAPDKAMINDDVRNLLKSCNNNFIIGIDRGERNLLYVSVIDSNGAIIYQHSLNIIGNKFKGKTYETNYREKLATREKDRTEQRRNWKAIESIKELKEGYISQAVHVICQLVVKYDAIIVMEKLTDGFKRGRTKFEKQVYQKFEKMLIDKLNYYVDKKLDPDEEGGLLHAYQLTNKLESFDKLGTQSGFIFYVRPDFTSKIDPVTGFVNLLYPRYENIDKAKDMISRFDDIRYNAGEDFFEFDIDYDKFPKTASDYRKKWTICTNGERIEAFRNPANNNEWSYRTIILAEKFKELFDNNSINYRDSDDLKAEILSQTKGKFFEDFFKLLRLTLQMRNSNPETGEDRILSPVKDKNGNFYDSSKYDEKSKLPCDADANGAYNIARKGLWIVEQFKKADNVSTVEPVIHNDKWLKFVQENDMANN

SEQ ID NO: 31 - protein, 1244 aa, Unknown
  Description of Unknown: ART31 sequence
MQERKKISHLTHRNSVKKTIRMQLNPVGKTMDYFQAKQILENDEKLKENYQKIKEIADRFYRNLNEDVLSKTGLDKLKDYAEIYYHCNTDADRKRLNKCASELRKEIVKNFKNRDEYNKLFDKRMIEIVLPKHLKNEDEKEVVASFKNFTTYFTGFFTNRKNMYSDGEESTAIAYRCINENLPKHLDNVKAFEKAISKLSKNAIDDLDAYSGLCGTNLYDVFTVDYFNFLLPQSGITEYNKIIGGYTTNDGTKVKGINEYINLYNQQVSKRDKIPNLQILYKQILSESEKVSFIPPKFEDDNELLSAVSEFYANDETFDGMPLKKAIDETKLLFGNLDNSSLNGIYIQNDRSVTNLSNSMFGSWSVIEDLWNKNYDSVNSNSRIKDIQKREDKRKKAYKAEKKLSLSFLQVLISNSENDEIRKKSIVDYYKTSLMQLTDNLSDKYNEAAPLLNENYSNEKGLKNDDKSISLIKNFLDAIKEIEKFIKPLSETNITGEKNDLFYSQFTPLLDNISRIDILYDKVRNYVTQKPFSTDKIKLNFGNYQLLNGWDKDKEREYGAVLLCKDEKYYLAIIDKSNNRILENIDFQDCDESDCYEKIIYKLLPTPNKMLPKVFFAKKHKKLLSPSDEILKIYKNGTFKKGDKFSLDDCHKLIDFYKESFKKYPKWLIYNFKFKKTNGYNDIREFYNDVALQGYNISKMKIPTSFIDKLVDEGKIYLFQLYNKDFSPHSKGTPNLHTLYFKMLFDERNLEDVVYRLNGEAEMFYRPASIKYDKPTHPKNTPIKNKNTLNDKRASTFPYDLIKDKRYTKWQFSLHFPITMNFKDPDKAMINDDVRNLLKSCNNNFIIGIDRGERNLLYVSVINSNGAIIYQHSLNIIGNKFKGKTYETNYREKLATREKDRTEQRRNWKAIESIKELKEGYISQAVHVICQLVVKYDAIIVMEKLTDGFKRGRTKFEKQVYQKFEKMLIDKLNYYVDKKLDPDEEGGLLHAYQLTNKLESFDKLGTQSGFIFYVRPDFTSKIDPVTGFVNLLYPRYEKIDKAKDMISRFDDIRYNAGEDFFEFDIDYDKFPKTASDYRKKWTICTNGERIEAFRNPANNNEWSYRTIILAEKFKELFDNNSINYRDSDDLKAEILSQTKGKFFEDFFKLLRLTLQMRNSNPETGEDRILSPVKDKNGNFYDSSKYDEKSKLPCDADANGAYNIARKGLWIVEQFKKADNVSTVEPVIHNDKWLKFVQENDMANN

SEQ ID NO: 32 - protein, 1175 aa, Unknown
  Description of Unknown: ART32 sequence
KTGLDKLKDYAEIYYHCNTDADRKRLNKCASELRKEIVKNFKNRDEYNKLFDKRMIEIVLPKHLKNEDEKEVVASFKNFTTYFTGFFTNRKNMYSDGEESTAIAYRCINENLPKHLDNVKAFEKAISKLSKNAIDDLDATYSGLCGTNLYDVFTVDYFNFLLPQSGITEYNKIIGGYTTSDGTKVKGINEYINLYNQQVSKRDKIPNLQILYKQILSESEKVSFIPPKFEDDNELLSAVSEFYANDETFDEMPLKKAIDETKLLFGNLDNSSLNGIYIQNDRSVTNLSNSMFGSWSVIEDLWNKNYDSVNSNSRIKDIQKREDKRKKAYKAEKKLSLSFLQVLISNSENNEIREKSIVDYYKTSLMQLTDNLSDKYNEVAPLLNENYSNEKGLKNDDKSISLIKNFLDAIKEIEKFIKPLSETNITGEKNDLFYSQFTPLLDNISRIDILYDKVRNYVTQKPFSTDKIKLNFGNYQLLNGWDKDKEREYGAVLLCRDEKYYLAIIDKSNNRILENIDFQDCDESDCYEKIIYKLLPTPNKMLPKVFFAKKHKKLLSPSDEILKIRKNGTFKKGDKFSLDDCHKLIDFYKESFKKYPNWLIYNFKFKKTNEYNDIREFYNDVALQGYNISKMKIPTSFIDKLVDEGKIYLFQLYNKDFSPHSKGTPNLHTLYFKMLFDERNLEDVVYKLNGEAKMFYRPASIKYDKPTHPKNTPIKNKNTLNDKKASTFPYDLIKDKRYTKWQFSLHFSITMNFKAPDKAMINDDVRNLLKSCNNNFIIGIDRGERNLLYVSVIDSNGAIIYQHSLNIIGNKFKGKTYETNYREKLATREKERTEQRRNWKAIESIKELKEGYISQAVHVICQLVVKYDAIIVMEKLTDGFKRGRTKFEKQVYQKFEKMLIDKLNYYVDKKLDPDEEGGLLHAYQLTNKLESFDKLGTQSGFIFYVRPDFTSKIDPVTGFVNLLYPRYENIDKAKDMISRFDDIRYNAGEDFFEFDIDYDKFPKTASDYRKKWTICTNGERIEAFRNPANNNEWSYRTIILAEKFKELFDNNSINYRDSDDLKAEILSQTKGKFFEDFFKLLRLTLQMRNSNPETGEDRILSPVKDKNGNFYDSSKYDEKSKLPCDADANGAYNIARKGLWIVEQFKKSDNVSTVEPVIHNDKWLKFVQENDMANN

SEQ ID NO: 33 - protein, 1278 aa, Unknown
  Description of Unknown: ART33 sequence
MSININKFSDECRKIDFFTDLYNIQKTLRFSLIPIGATADNFEFKGRLSKEKDLLDSAKRIKEYISKYLADESDICLSQPVKLKHLDEYYELYITKDRDEQKFKSVEEKLRKELADLLKEILKRLNKKILSDYLPEYLEDDEKALEDIANLSSFSTYFNSYYDNCKNMYTDKEQSTAIPYRCINDNLPKFIDNMKAYEKALEELKPSDLEELRNNFKGVYDTTVDDMFTLDYFNCVLSQSGIDSYNAIIGNDKVKGINEYINLHNQTAEQGHKVPNLKRLYKQIGSQKKTISFLPSKFESDNELLKAVYDFYNTGDAEKNFTALKDTITEFEKIFDNLSEYNLDGVFVRNDISLTNLSQSMFNDWSVFRNLWNDQYDKVNNPEKAKDIDKYNDKRHKVYKKSESFSINQLQELIATTLEEDINSKKITDYFSCDFHRVTTEVENKYQLVKDLLSSDYPKNKNLKTSEEDVALIKDFLDSVKSLESFVKILTGTGKESGKDELFYGSFTKWFDQLRYIDKLYDKVRNYITEKPYSLDKIKLSFDNPQFLGGWQHSKETDYSAQLFMKDGLYYLGVMDKETKREFKTQYNTPENDSDTMVKIEYNQIPNPGRVIQNLMLVDGKIVKKNGRKNADGVNAVLEELKNQYLPENINRIRKTESYKTTSNNFNKDDLKAYLEYYIARTKEYYCKYNFVFKSADEYGSFNEFVDDVNNQAYQITKVKVSEKQLLSLVEQGKLYLFKIYNKDFSEYSKGKKNLHTMYFQMLFDDRNLENLVYKLQGGAEMFYRPASIKKDSEFKHDANVEIIKRTCEDKVNDKDNPTDDEKAKYYSKFDYDIVKNKRFTKDQFSLHLTLAMNCNQPDHYWLNNDVRELLKKSNKNHIIGIDRGERNLIYVTIINSDGVIVDQINFNIIENSYNGKKYKTDYQKKLNQREEDRQKARKTWKTIETIKELKDGYISQVVHQICKLIVQYDAIVVMENLNGGFKRGRTKVEKQVYQKFETMLINKLNYYVDKGTDYKECGGLLKAYQLTNKFETFERIGKQSGIIFYVDPYLTSKIDPVTGFANLLYPKYETIPKTHNFISNIDDIRYNQSEDYFEFDIDYDKFPQGSYNYRKKWTICSYGNRIKYYKDSRNKTASVVVDITEKFKETFTNAGIDFVNDNIKEKLLLVNSKELLKSFMDTLKLTVQLRNSEINSDVDYIISPIKDRNGNFYYSENYKKSNNEVPSQPQDGDANGAYNIARKGLMIINKLKKADDVTNNELLKISKKEWLEFAQKGDLGE

SEQ ID NO: 34 - protein, 1562 aa, Unknown
  Description of Unknown: ART34 sequence
MKATSIWDNFTRKYSVSKTLRFELRPVGKTEENIVKKEIIDAEWISGKNIPKGTDADRARDYKIVKKLLNQLHILFINQALSSENVKEFEKEDKKSKTFVAWSDLLATHFDNWIQYTRDKSNSTVLKSLEKSKKDLYSKLGKLLNSKANAWKAEFISYHKIKSPDNIKIRLSASNVQILFGNTSDPIQLLKYQIELDNIKFLKDDGSEYTTKELADLLSTFEKFGTYFSGFNQNRANVYDIDGEISTSIAYRLFNQNIEFFFQNIKRWEQFTSSIGHKEAKENLKLVQWDIQSKLKELDMEIVQPRFNLKFEKLLTPQSFIYLLNQEGIDAFNTVLGGIPAEVKAEKKQGVNELINLTRQKLNEDKRKFPSLQIMYKQIMSERKTNFIDQYEDDVEMLKEIQEFSNDWNEKKKRHSASSKEIKESAIAYIQREFHETFDSLEERATVKEDFYLSEKSIQNLSIDIFGGYNTIHNLWYTEVEGMLKSGERPLTRVEKEKLKKQEYISFAQIERLISKHSQQYLDSTPKEANDRSLFKEKWKKTFKNGFKVSEYTNLKLNELISEGETFQKIDQETGKETTIKIPGLFESYENAILVESIKNQSLGTNKKESVPSIKEYLDSCLRLSKFIESFLVNSKDLKEDQSLDGCSDFQNTLTQWLNEEFDVFILYNKVRNHVTKKPGNTDKIKINFDNATLLDGWDVDKEAANFGFLLKKADNYYLGIADSSFNQDLKYFNEGERLDEIEKNRKNLEKEESKNISKIDQEKVKKYKEVIDDLKAISNLNKGRYSKAFYKQSKFTTLIPKCTTQLNEVIEHFKKFDTDYRIENKKFAKPFIITKEVFLLNNTVYDTATKKFTLKIGEDEDTKGLKKFQIGYYRATDDKKGYESALRNWITFCIEFTKSYKSCLNYNYSSLKSVSEYKSLDEFYKDLNGIGYTIDFVDISEEYINKKINEGKLYLFQIYNKDFSEKSKGKENLHTTYWKLLFDSKNLEDVVIKLNGQAEVFFRPASIHEKEKITHFKNQEIQNKNPNAVKKTSKFEYDIIKDNRFTKNKFLFHCPITLNFKADGNPYVNNEVQENIAKNPNVNIIGIDRGEKHLLYFTVINQQGQILDAGSLNSIKSEYKDKNQQSVSFETPYHKILDKKESERKEARESWQEIENIKELKAGYLSHVVHQLSNLIVKYNAIVVLEDLNKGFKRGRFKVEKQVYQKFEKSLIEKLNYLVFKDRKESNEPGHHLNAYQLTNKFLSFERLGKQSGVLFYATASYTSKVDPVTGFMQNIYDPYHKEKTREFYKNFTKIVYNGNYFEFNYDLNSVKPDSEEKRYRTNWTVCSCVIRSEYDSNSKTQKTYNVNDQLVKLFEDAKIKIENGNDLKSTILEQDDKFIRDLHFYFIAIQKMRVVDSKIEKGEDSNDYIQSPVYPFYCSKEIQPNKKGFYELPSNGDSNGAYNIARKGIVILDKIRLRVQIEKLFEDGTKIDWQKLPNLISKVKDKKLLMTVFEEWAELTHQGEVQQGDLLGKKMSKKGEQFAEFIKGLNVTKEDWEIYTQNEKVVQKQIKTWKLFSNST

SEQ ID NO: 35 - protein, 1742 aa, Unknown
  Description of Unknown: ART35 sequence
MKAINEYYKQLGAYCREEGKEKDDFFKRIDGAYCAISHLFFGEHGEIAQSDSDVELIQKLLEAYKGLQRFIKPLLGHGDEADKDNEFDAKLRKVWDELDIITPLYDKVRNWLSRKIYNPEKIKLCFENNGKLLSGWVDSRTKSDNGTQYGGYIFRKKNEIGEYDFYLGISADTKLFRRDAAISYDDGMYERLDYYQLKSKTLLGNSYVGDYGLDSMNLLSAFKNAAVKFQFEKEVVPKDKENVPKYLKRLKLDYAGFYQILMNDDKVVDAYKIMKQHILATLTSSIRVPAAIELATQKELGIDELIDEIMNLPSKSFGYFPIVTAAIEEANKRENKPLFLFKMSNKDLSYAATASKGLRKGRGTENLHSMYLKALLGMTQSVFDIGSGMVFFRHQTKGLAETTARHKANEFVANKNKLNDKKKSIFGYEIVKNKRFTVDKYLFKLSMNLNYSQPNNNKIDVNSKVREIISNGGIKNIIGIDRGERNLLYLSLIDLKGNIVMQKSLNILKDDHNAKETDYKGLLTEREGENKEARRNWKKIANIKDLKRGYLSQVVHIISKMMVEYNAIVVLEDLNPGFIRGRQKIERNVYEQFERMLIDKLNFYVDKHKGANETGGLLHALQLTSEFKNFKKSEHQNGCLFYIPAWNTSKIDPATGFVNLFNTKYTNAVEAQEFFSKFDEIRYNEEKDWFEFEFDYDKFTQKAHGTRTKWTLCTYGMRLRSFKNSAKQYNWDSEVVALTEEFKRILGEAGIDIHENLKDAICNLEGKSQKYLEPLMQFMKLLLQLRNSKAGTDEDYILSPVADENGIFYDSRSCGDQLPENADANGAYNIARKGLMLIEQIKNAEDLNNVKFDISNKAWLNFAQQKPYKNGMKAINEYYKQLGAYCREEGKEKDDFFKRIDGAYCAISHLFFGEHGEIAQSDSDVELIQKLLEAYKGLQRFIKPLLGHGDEADKDNEFDAKLRKVWDELDIITPLYDKVRNWLSRKIYNPEKIKLCFENNGKLLSGWVDSRTKSDNGTQYGGYIFRKKNEIGEYDFYLGISADTKLFRRDAAISYDDGMYERLDYYQLKSKTLLGNSYVGDYGLDSMNLLSAFKNAAVKFQFEKEVVPKDKENVPKYLKRLKLDYAGFYQILMNDDKVVDAYKIMKQHILATLTSSIRVPAAIELATQKELGIDELIDEIMNLPSKSFGYFPIVTAAIEEANKRENKPLFLFKMSNKDLSYAATASKGLRKGRGTENLHSMYLKALLGMTQSVFDIGSGMVFFRHQTKGLAETTARHKANEFVANKNKLNDKKKSIFGYEIVKNKRFTVDKYLFKLSMNLNYSQPNNNKIDVNSKVREIISNGGIKNIIGIDRGERNLLYLSLIDLKGNIVMQKSLNILKDDHNAKETDYKGLLTEREGENKEARRNWKKIANIKDLKRGYLSQVVHIISKMMVEYNAIVVLEDLNPGFIRGRQKIERNVYEQFERMLIDKLNFYVDKHKGANETGGLLHALQLTSEFKNFKKSEHQNGCLFYIPAWNTSKIDPATGFVNLFNTKYTNAVEAQEFFSKFDEIRYNEEKDWFEFEFDYDKFTQKAHGTRTKWTLCTYGMRLRSFKNSAKQYNWDSEVVALTEEFKRILGEAGIDIHENLKDAICNLEGKSQKYLEPLMQFMKLLLQLRNSKAGTDEDYILSPVADENGIFYDSRSCGDQLPENADANGAYNIARKGLMLIEQIKNAEDLNNVKFDISNKAWLNFAQQKPYKNG

SEQ ID NO: 36 - protein, 1205 aa, Artificial Sequence
  Description of Artificial Sequence: Synthetic polypeptide
MYYQGLTKLYPISKTIRNELIPVGKTLEHIRMNNILEADIQRKSDYERVKKLMDDYHKQLINESLQDVHLSYVEEAADLYLNASKDKDIVDKFSKCQDKLRKEIVNLLKSHENFPKIGNKEIIKLLQSLSDTEKDYNALDSFSKFYTYFTSYNEVRKNLYSDEEKSSTAAYRLINENLPKFLDNIKAYSIAKSAGVRAKELTEEEQDCLFMTETFERTLTQDGIDNYNELIGKLNFAINLYNQQNNKLKGFRKVPKMKELYKQILSEREASFVDEFVDDEALLTNVESFSAHIKEFLESDSLSRFAEVLEESGGEMVYIKNDTSKTTFSNIVFGSWNVIDERLAEEYDSANSKKKKDEKYYDKRHKELKKNKSYSVEKIVSLSTETEDVIGKYIEKLQADIIAIKETREVFEKVVLKEHDKNKSLRKNTKAIEAIKSFLDTIKDFERDIKLISGSEHEMEKNLAVYAEQENILSSIRNVDSLYNMSRNYLTQKPFSTEKFKLNFNRATLLNGWDKNKETDNLGILLVKEGKYYLGIMNTKANKSFVNPPKPKTDNVYHKVNYKLLPGPNKMLPKVFFAKSNLEYYKPSEDLLAKYQAGTHKKGENFSLEDCHSLISFFKDSLEKHPDWSEFGFKFSDTKKYDDLSGFYREVEKQGYKITYTDIDVEYIDSLVEKDELYFFQIYNKDFSPYSKGNYNLHTLYLTMLFDERNLRNVVYKLNGEAEVFYRPASIGKDELIIHKSGEEIKNKNPKRAIDKPTSTFEYDIVKDRRYTKDKFMLHIPVTMNFGVDETRRFNEVVNDAIRGDDKVRVIGIDRGERNLLYVVVVDSDGTILEQISLNSIINNEYSIETDYHKLLDEKEGDRDRARKNWTTIENIKELKEGYLSQVVNVIAKLVLKYDAIICLEDLNFGFKRGRQKVEKQVYQKFEKMLIDKLNYLVIDKSRSQENPEEVGHVLNALQLTSKFTSFKELGKQTGIIYYVPAYLTSKIDPTTGFANLFYVKYESVEKSKDFFNRFDSICFNKVAGYFEFSFDYKNFTDRACGMRSKWKVCTNGERIIKYRNEEKNSSFDDKVIVLTEEFKKLFNEYGIAFNDCMDLTDAINAIDDASFFRKLTKLFQQTLQMRNSSADGSRDYIISPVENDNGEFFNSEKCDKSKPKDADANGAFNIARKGLWVLEQLYNSSSGEKLNLAMTNAEWLEYAQQHTI

SEQ ID NO: 37 - protein, 1263 aa, Unknown
  Description of Unknown: MAD7 sequence
MNNGTNNFQNFIGISSLQKTLRNALIPTETTQQFIVKNGIIKEDELRGENRQILKDIMDDYYRGFISETLSSIDDIDWTSLFEKMEIQLKNGDNKDTLIKEQTEYRKAIHKKFANDDRFKNMFSAKLISDILPEFVIHNNNYSASEKEEKTQVIKLFSRFATSFKDYFKNRANCFSADDISSSSCHRIVNDNAEIFFSNALVYRRIVKSLSNDDINKISGDMKDSLKEMSLEEIYSYEKYGEFITQEGISFYNDICGKVNSFMNLYCQKNKENKNLYKLQKLHKQILCIADTSYEVPYKFESDEEVYQSVNGFLDNISSKHIVERLRKIGDNYNGYNLDKIYIVSKFYESVSQKTYRDWETINTALEIHYNNILPGNGKSKADKVKKAVKNDLQKSITEINELVSNYKLCSDDNIKAETYIHEISHILNNFEAQELKYNPEIHLVESELKASELKNVLDVIMNAFHWCSVFMTEELVDKDNNFYAELEEIYDEIYPVISLYNLVRNYVTQKPYSTKKIKLNFGIPTLADGWSKSKEYSNNAIILMRDNLYYLGIFNAKNKPDKKIIEGNTSENKGDYKKMIYNLLPGPNKMIPKVFLSSKTGVETYKPSAYILEGYKQNKHIKSSKDFDITFCHDLIDYFKNCIAIHPEWKNFGFDFSDTSTYEDISGFYREVELQGYKIDWTYISEKDIDLLQEKGQLYLFQIYNKDFSKKSTGNDNLHTMYLKNLFSEENLKDIVLKLNGEAEIFFRKSSIKNPIIHKKGSILVNRTYEAEEKDQFGNIQIVRKNIPENIYQELYKYFNDKSDKELSDEAAKLKNVVGHHEAATNIVKDYRYTYDKYFLHMPITINFKANKTGFINDRILQYIAKEKDLHVIGIDRGERNLIYVSVIDTCGNIVEQKSFNIVNGYDYQIKLKQQEGARQIARKEWKEIGKIKEIKEGYLSLVIHEISKMVIKYNAIIAMEDLSYGFKKGRFKVERQVYQKFETMLINKLNYLVFKDISITENGGLLKGYQLTYIPDKLKNVGHQCGCIFYVPAAYTSKIDPTTGFVNIFKFKDLTVDAKREFIKKFDSIRYDSEKNLFCFTFDYNNFITQNTVMSKSSWSVYTYGVRIKRRFVNGRFSNESDTIDITKDMEKTLEMTDINWRDGHDLRQDIIDYEIVQHIFEIFRLTVQMRNSLSELEDRDYDRLISPVLNENNIFYDSAKAGDALPKDADANGAYCIALKGLYEIKQITENWKEDGKFSRDKLKISNKDWFDFIQNKRYL

SEQ ID NO: 38 - protein, 1334 aa, Unknown
  Description of Unknown: MAD2 sequence
MSSLTKFTNKYSKQLTIKNELIPVGKTLENIKENGLIDGDEQLNENYQKAKIIVDDFLRDFINKALNNTQIGNWRELADALNKEDEDNIEKLQDKIRGIIVSKFETFDLFSSYSIKKDEKIIDDDNDVEEEELDLGKKTSSFKYIFKKNLFKLVLPSYLKTTNQDKLKIISSFDNFSTYFRGFFENRKNIFTKKPISTSIAYRIVHDNFPKFLDNIRCFNVWQTECPQLIVKADNYLKSKNVIAKDKSLANYFTVGAYDYFLSQNGIDFYNNIIGGLPAFAGHEKIQGLNEFINQECQKDSELKSKLKNRHAFKMAVLFKQILSDREKSFVIDEFESDAQVIDAVKNFYAEQCKDNNVIFNLLNLIKNIAFLSDDELDGIFIEGKYLSSVSQKLYSDWSKLRNDIEDSANSKQGNKELAKKIKTNKGDVEKAISKYEFSLSELNSIVHDNTKFSDLLSCTLHKVASEKLVKVNEGDWPKHLKNNEEKQKIKEPLDALLEIYNTLLIFNCKSFNKNGNFYVDYDRCINELSSVVYLYNKTRNYCTKKPYNTDKFKLNFNSPQLGEGFSKSKENDCLTLLFKKDDNYYVGIIRKGAKINFDDTQAIADNTDNCIFKMNYFLLKDAKKFIPKCSIQLKEVKAHFKKSEDDYILSDKEKFASPLVIKKSTFLLATAHVKGKKGNIKKFQKEYSKENPTEYRNSLNEWIAFCKEFLKTYKAATIFDITTLKKAEEYADIVEFYKDVDNLCYKLEFCPIKTSFIENLIDNGDLYLFRINNKDFSSKSTGTKNLHTLYLQAIFDERNLNNPTIMLNGGAELFYRKESIEQKNRITHKAGSILVNKVCKDGTSLDDKIRNEIYQYENKFIDTLSDEAKKVLPNVIKKEATHDITKDKRFTSDKFFFHCPLTINYKEGDTKQFNNEVLSFLRGNPDINIIGIDRGERNLIYVTVINQKGEILDSVSFNTVTNKSSKIEQTVDYEEKLAVREKERIEAKRSWDSISKIATLKEGYLSAIVHEICLLMIKHNAIVVLENLNAGFKRIRGGLSEKSVYQKFEKMLINKLNYFVSKKESDWNKPSGLLNGLQLSDQFESFEKLGIQSGFIFYVPAAYTSKIDPTTGFANVLNLSKVRNVDAIKSFFSNFNEISYSKKEALFKFSFDLDSLSKKGFSSFVKFSKSKWNVYTFGERIIKPKNKQGYREDKRINLTFEMKKLLNEYKVSFDLENNLIPNLTSANLKDTFWKELFFIFKTTLQLRNSVTNGKEDVLISPVKNAKGEFFVSGTHNKTLPQDCDANGAYHIALKGLMILERNNLVREEKDTKKIMAISNVDWFEYVQKRRGVL

SEQ ID NO: 39 - protein, 10 aa, Artificial Sequence
  Description of Artificial Sequence: Synthetic peptide
YLFQIYNKDF

SEQ ID NO: 40 - protein, 7 aa, Artificial Sequence
  Description of Artificial Sequence: Synthetic peptide
PKKKRKV

SEQ ID NO: 41 - protein, 16 aa, Artificial Sequence
  Description of Artificial Sequence: Synthetic peptide
KRPAATKKAGQAKKKK

SEQ ID NO: 42 - protein, 9 aa, Artificial Sequence
  Description of Artificial Sequence: Synthetic peptide
PAAKRVKLD

SEQ ID NO: 43 - protein, 11 aa, Artificial Sequence
  Description of Artificial Sequence: Synthetic peptide
RQRRNELKRSP

SEQ ID NO: 44 - protein, 38 aa, Artificial Sequence
  Description of Artificial Sequence: Synthetic polypeptide
NQSSNFGPMKGGNFGGRSSGPYGGGGQYFAKPRNQGGY

SEQ ID NO: 45 - protein, 42 aa, Artificial Sequence
  Description of Artificial Sequence: Synthetic polypeptide
RMRIZFKNKGKDTAELRRRRVEVSVELRKAKKDEQILKRRNV

SEQ ID NO: 46 - protein, 8 aa, Artificial Sequence
  Description of Artificial Sequence: Synthetic peptide
VSRKRPRP

SEQ ID NO: 47 - protein, 8 aa, Artificial Sequence
  Description of Artificial Sequence: Synthetic peptide
PPKKARED

SEQ ID NO: 48 - protein, 8 aa, Artificial Sequence
  Description of Artificial Sequence: Synthetic peptide
PQPKKKPL

SEQ ID NO: 49 - protein, 12 aa, Artificial Sequence
  Description of Artificial Sequence: Synthetic peptide
SALIKKKKKMAP

SEQ ID NO: 50 - protein, 5 aa, Artificial Sequence
  Description of Artificial Sequence: Synthetic peptide
DRLRR

SEQ ID NO: 51 - protein, 7 aa, Artificial Sequence
  Description of Artificial Sequence: Synthetic peptide
PKQKKRK

SEQ ID NO: 52 - protein, 10 aa, Artificial Sequence
  Description of Artificial Sequence: Synthetic peptide
RKLKKKIKKL

SEQ ID NO: 53 - protein, 10 aa, Artificial Sequence
  Description of Artificial Sequence: Synthetic peptide
REKKKFLKRR

SEQ ID NO: 54 - protein, 20 aa, Artificial Sequence
  Description of Artificial Sequence: Synthetic peptide
KRKGDEVDGVDEVAKKKSKK

SEQ ID NO: 55 - protein, 17 aa, Artificial Sequence
  Description of Artificial Sequence: Synthetic peptide
RKCLQAGMNLEARKTKK

SEQ ID NO: 56 - protein, 9 aa, Artificial Sequence
  Description of Artificial Sequence: Synthetic peptide
PAAKKKKLD

SEQ ID NO: 57 - RNA, 19 nt, Artificial Sequence
  Description of Artificial Sequence: Synthetic oligonucleotide
uaauuucuacucuuguaga

SEQ ID NO: 58 - RNA, 15 nt, Artificial Sequence
  Description of Artificial Sequence: Synthetic oligonucleotide
aucuacaacaguaga

SEQ ID NO: 59 - RNA, 15 nt, Artificial Sequence
  Description of Artificial Sequence: Synthetic oligonucleotide
aucuacaaaaguaga

SEQ ID NO: 60 - RNA, 20 nt, Artificial Sequence
  Description of Artificial Sequence: Synthetic oligonucleotide
ggaauuucuacucuuguaga

SEQ ID NO: 61 - RNA, 19 nt, Artificial Sequence
  Description of Artificial Sequence: Synthetic oligonucleotide
uaauucccacucuuguggg

SEQ ID NO: 62 - RNA, 15 nt, Artificial Sequence
  Description of Artificial Sequence: Synthetic oligonucleotide
aucuacaagaguaga

SEQ ID NO: 63 - RNA, 15 nt, Artificial Sequence
  Description of Artificial Sequence: Synthetic oligonucleotide
aucuacacuaguaga

SEQ ID NO: 64 - RNA, 20 nt, Artificial Sequence
  Description of Artificial Sequence: Synthetic oligonucleotide
uaauuucuacuaaguguaga

SEQ ID NO: 65 - RNA, 21 nt, Artificial Sequence
  Description of Artificial Sequence: Synthetic oligonucleotide
uaauuuucuacuuguuguaga

SEQ ID NO: 66 - RNA, 18 nt, Artificial Sequence
  Description of Artificial Sequence: Synthetic oligonucleotide
aauuucuacuguuguaga

SEQ ID NO: 67 - RNA, 19 nt, Artificial Sequence
  Description of Artificial Sequence: Synthetic oligonucleotide
gaauuucuacuguuguaga

SEQ ID NO: 68 - RNA, 36 nt, Artificial Sequence
  Description of Artificial Sequence: Synthetic oligonucleotide
gucuaaagguaccaccaaauuucuacuguuguagau

SEQ ID NO: 69 - RNA, 36 nt, Artificial Sequence
  Description of Artificial Sequence: Synthetic oligonucleotide
gcuuagaaccuuuaaauaauuucuacuauuguagau

SEQ ID NO: 70 - RNA, 10 nt, Artificial Sequence
  Description of Artificial Sequence: Synthetic oligonucleotide
uaauuucuac

SEQ ID NO: 71 - RNA, 6 nt, Artificial Sequence
  Description of Artificial Sequence: Synthetic oligonucleotide
aucuac

SEQ ID NO: 72 - RNA, 11 nt, Artificial Sequence
  Description of Artificial Sequence: Synthetic oligonucleotide
ggaauuucuac

SEQ ID NO: 73 - RNA, 10 nt, Artificial Sequence
  Description of Artificial Sequence: Synthetic oligonucleotide
uaauucccac

SEQ ID NO: 74 - RNA, 12 nt, Artificial Sequence
  Description of Artificial Sequence: Synthetic oligonucleotide
uaauuuucuacu

SEQ ID NO: 75 - RNA, 9 nt, Artificial Sequence
  Description of Artificial Sequence: Synthetic oligonucleotide
aauuucuac

SEQ ID NO: 76 - RNA, 10 nt, Artificial Sequence
  Description of Artificial Sequence: Synthetic oligonucleotide
gaauuucuac

SEQ ID NO: 77 - RNA, 10 nt, Artificial Sequence
  Description of Artificial Sequence: Synthetic oligonucleotide
aaauuucuac

SEQ ID NO: 78 - DNA, 508 bp, Artificial Sequence
  Description of Artificial Sequence: Synthetic polynucleotide
cgttacataacttacggtaaatggcccgcctggctgaccgcccaacgacccccgcccattgacgtcaataatgacgtatgttcccatagtaacgccaatagggactttccattgacgtcaatgggtggagtatttacggtaaactgcccacttggcagtacatcaagtgtatcatatgccaagtacgccccctattgacgtcaatgacggtaaatggcccgcctggcattatgcccagtacatgaccttatgggactttcctacttggcagtacatctacgtattagtcatcgctattaccatggtgatgcggttttggcagtacatcaatgggcgtggatagcggtttgactcacggggatttccaagtctccaccccattgacgtcaatgggagtttgttttggcaccaaaatcaacgggactttccaaaatgtcgtaacaactccgccccattgacgcaaatgggcggtaggcgtgtacggtgggaggtctatataagcagagct

SEQ ID NO: 79 - DNA, 81 bp, Artificial Sequence
  Description of Artificial Sequence: Synthetic oligonucleotide
gtacttatataagggggtgggggcgcgttcgtcctcagtcgcgatcgaacactcgagccgagcagacgtgcctacggaccg

SEQ ID NO: 80 - DNA, 385 bp, Artificial Sequence
  Description of Artificial Sequence: Synthetic polynucleotide
cgttacataacttacggtaaatggcccgcctggctgaccgcccaacgacccccgcccattgacgtcaataatgacgtatgttcccatagtaacgccaatagggactttccattgacgtcaatgggtggagtatttacggtaaactgcccacttggcagtacatcaagtgtatcatatgccaagtacgccccctattgacgtcaatgacggtaaatggcccgcctggcattatgcccagtacatgaccttatgggactttcctacttggcagtacatctacgtattagtcatcgctattaccatggtacttatataagggggtgggggcgcgttcgtcctcagtcgcgatcgaacactcgagccgagcagacgtgcctacggaccg

SEQ ID NO: 81 - DNA, 947 bp, Artificial Sequence
  Description of Artificial Sequence: Synthetic polynucleotide
tcaatattggccattagccatattattcattggttatatagcataaatcaatattggctattggccattgcatacgttgtatctatatcataatatgtacatttatattggctcatgtccaatatgaccgccatgttggcattgattattgactagttattaatagtaatcaattacggggtcattagttcatagcccatatatggagttccgcgttacataacttacggtaaatggcccgcctggctgaccgcccaacgacccccgcccattgacgtcaataatgacgtatgttcccatagtaacgccaatagggactttccattgacgtcaatgggtggagtatttacggtaaactgcccacttggcagtacatcaagtgtatcatatgccaagtccgccccctattgacgtcaatgacggtaaatggcccgcctggcattatgcccagtacatgaccttacgggactttcctacttggcagtacatctacgtattagtcatcgctattaccatggtgatgcggttttggcagtacaccaatgggcgtggatagcggtttgactcacggggatttccaagtctccaccccattgacgtcaatgggagtttgttttggcaccaaaatcaacgggactttccaaaatgtcgtaataaccccgccccgttgacgcaaatgggcggtaggcgtgtacggtgggaggtctatataagcagaggtcgtttagtgaaccgtcagatcactagtagctttattgcggtagtttatcacagttaaattgctaacgcagtcagtgctcgactgatcacaggtaagtatcaaggttacaagacaggtttaaggaggccaatagaaactgggcttgtcgagacagagaagattcttgcgtttctgataggcacctattggtcttactgacatccactttgcctttctctccacaggg

SEQ ID NO: 82 - DNA, 195 bp, Artificial Sequence
  Description of Artificial Sequence: Synthetic polynucleotide
gaattcgggcggagttagggcggagccaatcagcgtgcgccgttccgaaagttgccttttatggctgggcggagaatgggcggtgaacgccgatgattatataaggacgcgccgggtgtggcacagctagttccgtcgcagccgggatttgggtcgcggttcttgtttgtggatccctgtgatcgtcacttgaca

SEQ ID NO: 83 - DNA, 1723 bp, Artificial Sequence
  Description of Artificial Sequence: Synthetic polynucleotide
atctcgactagttattaatagtaatcaattacggggtcattagttcatagcccatatatggagttccgcgttacataacttacggtaaatggcccgcctggctgaccgcccaacgacccccgcccattgacgtcaataatgacgtatgttcccatagtaacgccaatagggactttccattgacgtcaatgggtggagtatttacggtaaactgcccacttggcagtacatcaagtgtatcatatgccaagtacgccccctattgacgtcaatgacggtaaatggcccgcctggcattatgcccagtacatgaccttatgggactttcctacttggcagtacatctacgtattagtcatcgctattaccatggtcgaggtgagccccacgttctgcttcactctccccatctcccccccctccccacccccaattttgtatttatttattttttaattattttgtgcagcgatgggggcggggggggggggggggcgcgcgccaggcggggcggggcggggcgaggggcggggcggggcgaggcggagaggtgcggcggcagccaatcagagcggcgcgctccgaaagtttccttttatggcgaggcggcggcggcggcggccctataaaaagcgaagcgcgcggcgggcggggagtcgctgcgacgctgccttcgccccgtgccccgctccgccgccgcctcgcgccgcccgccccggctctgactgaccgcgttactcccacaggtgagcgggcgggacggcccttctcctccgggctgtaattagcgcttggtttaatgacggcttgtttcttttctgtggctgcgtgaaagccttgaggggctccgggagggccctttgtgcggggggagcggctcggggggtgcgtgcgtgtgtgtgtgcgtggggagcgccgcgtgcggctccgcgctgcccggcggctgtgagcgctgcgggcgcggcgcggggctttgtgcgctccgcagtgtgcgcgaggggagcgcggccgggggcggtgccccgcggtgcggggggggctgcgaggggaacaaaggctgcgtgcggggtgtgtgcgtgggggggtgagcagggggtgtgggcgcgtcggtcgggctgcaaccccccctgcacccccctccccgagttgctgagcacggcccggcttcgggtgcggggctccgtacggggcgtggcgcggggctcgccgtgccgggcggggggtggcggcaggtgggggtgccgggcggggcggggccgcctcgggccggggagggctcgggggaggggcgcggcggcccccggagcgccggcggctgtcgaggcgcggcgagccgcagccattgccttttatggtaatcgtgcgagagggcgcagggacttcctttgtcccaaatctgtgcggagccgaaatctgggaggcgccgccgcaccccctctagcgggcgcggggcgaagcggtgcggcgccggcaggaaggaaatgggcggggagggccttcgtgcgtcgccgcgccgccgtccccttctccctctccagcctcggggctgtccgcggggggacggctgccttcgggggggacggggcagggcggggttcggcttctggcgtgtgaccggcggctctagagcctctgctaaccatgttcatgccttcttctttttcctacagctcctgggcaacgtgctggttattgtgctgtctcatcattttggcaaagaatt

SEQ ID NO: 84 - DNA, 511 bp, Artificial Sequence
  Description of Artificial Sequence: Synthetic polynucleotide
ggggttggggttgcgccttttccaaggcagccctgggtttgcgcagggacgcggctgctctgggcgtggttccgggaaacgcagcggcgccgaccctgggtctcgcacattcttcacgtccgttcgcagcgtcacccggatcttcgccgctacccttgtgggccccccggcgacgcttcctgctccgcccctaagtcgggaaggttccttgcggttcgcggcgtgccggacgtgacaaacggaagccgcacgtctcactagtaccctcgcagacggacagcgccagggagcaatggcagcgcgccgaccgcgatgggctgtggccaatagcggctgctcagcagggcgcgccgagagcagcggccgggaaggggcggtgcgggaggcggggtgtggggcggtagtgtgggccctgttcctgcccgcgcggtgttccgcattctgcaagcctccggagcgcacgtcggcagtcggctccctcgttgaccgaatcaccgacctctctccccag

SEQ ID NO: 85 - DNA, 1195 bp, Artificial Sequence
  Description of Artificial Sequence: Synthetic polynucleotide
gaattcaggctccggtgcccgtcagtgggcagagcgcacatcgcccacagtccccgagaagttggggggaggggtcggcaattgaaccggtgcctagagaaggtggcgcggggtaaactgggaaagtgatgtcgtgtactggctccgcctttttcccgagggtgggggagaaccgtatataagtgcagtagtcgccgtgaacgttctttttcgcaacgggtttgccgccagaacacaggtaagtgccgtgtgtggttcccgcgggcctggcctctttacgggttatggcccttgcgtgccttgaattacttccacctggctgcagtacgtgattcttgatcccgagcttcgggttggaagtgggtgggagagttcgaggccttgcgcttaaggagccccttcgcctcgtgcttgagttgaggcctggcctgggcgctggggccgccgcgtgcgaatctggtggcaccttcgcgcctgtctcgctgctttcgataagtctctagccatttaaaatttttgatgacctgctgcgacgctttttttctggcaagatagtcttgtaaatgcgggccaagatctgcacactggtatttcggtttttggggccgcgggcggcgacggggcccgtgcgtcccagcgcacatgttcggcgaggcggggcctgcgagcgcggccaccgagaatcggacgggggtagtctcaagctggccggcctgctctggtgcctggtctcgcgccgccgtgtatcgccccgccctgggcggcaaggctggcccggtcggcaccagttgcgtgagcggaaagatggccgcttcccggccctgctgcagggagctcaaaatggaggacgcggcgctcgggagagcgggcgggtgagtcacccacacaaaggaaaagggcctttccgtcctcagccgtcgcttcatgtgactccacggagtaccgggcgccgtccaggcacctcgattagttctcgagcttttggagtacgtcgtctttaggttggggggaggggttttatgcgatggagtttccccacactgagtgggtggagactgaagttaggccagcttggcacttgatgtaattctccttggaatttgccctttttgagtttggatcttggttcattctcaagcctcagacagtggttcaaagtttttttcttccatttcaggtgtcgtgacatcatttt

SEQ ID NO: 86 - DNA, 21 bp, Artificial Sequence
  Description of Artificial Sequence: Synthetic oligonucleotide
accgcggccatcctgcaggca

SEQ ID NO: 87 - DNA, 21 bp, Artificial Sequence
  Description of Artificial Sequence: Synthetic oligonucleotide
tgagggaaaggacaagatgaa

SEQ ID NO: 88 - DNA, 21 bp, Artificial Sequence
  Description of Artificial Sequence: Synthetic oligonucleotide
ggatccagcaggccaaagctc

SEQ ID NO: 89 - DNA, 21 bp, Artificial Sequence
  Description of Artificial Sequence: Synthetic oligonucleotide
ctagcagagaaggaagaaccc

SEQ ID NO: 90 - DNA, 21 bp, Artificial Sequence
  Description of Artificial Sequence: Synthetic oligonucleotide
tgtgttgcagttcagcaggag

SEQ ID NO: 91 - DNA, 21 bp, Artificial Sequence
  Description of Artificial Sequence: Synthetic oligonucleotide
ctgagggttcttccttctctg

SEQ ID NO: 92 - DNA, 21 bp, Artificial Sequence
  Description of Artificial Sequence: Synthetic oligonucleotide
ccgttgtctttcctagcagag

SEQ ID NO: 93 - DNA, 21 bp, Artificial Sequence
  Description of Artificial Sequence: Synthetic oligonucleotide
tgcagttcctgcagaagaggg

SEQ ID NO: 94 - DNA, 21 bp, Artificial Sequence
  Description of Artificial Sequence: Synthetic oligonucleotide
tgcaggaactgcagaaagata

SEQ ID NO: 95 - DNA, 21 bp, Artificial Sequence
  Description of Artificial Sequence: Synthetic oligonucleotide
atcccaatctcactgtaggcc

SEQ ID NO: 96 - DNA, 21 bp, Artificial Sequence
  Description of Artificial Sequence: Synthetic oligonucleotide
catcccaatctcactgtaggc

SEQ ID NO: 97 - DNA, 21 bp, Artificial Sequence
  Description of Artificial Sequence: Synthetic oligonucleotide
ctcatttcactcccaaacaac

SEQ ID NO: 98 - DNA, 21 bp, Artificial Sequence
  Description of Artificial Sequence: Synthetic oligonucleotide
tcatttcactcccaaacaacc

SEQ ID NO: 99 - DNA, 21 bp, Artificial Sequence
  Description of Artificial Sequence: Synthetic oligonucleotide
actcccaaacaaccagcgccg

SEQ ID NO: 100 - DNA, 21 bp, Artificial Sequence
  Description of Artificial Sequence: Synthetic oligonucleotide
cgttatagagctggttctggc

SEQ ID NO: 101 - DNA, 21 bp, Artificial Sequence
  Description of Artificial Sequence: Synthetic oligonucleotide
ttttctgatttgctttcacgc

SEQ ID NO: 102 - DNA, 21 bp, Artificial Sequence
  Description of Artificial Sequence: Synthetic oligonucleotide
tgatttgctttcacgccaggg

SEQ ID NO: 103 - DNA, 21 bp, Artificial Sequence
  Description of Artificial Sequence: Synthetic oligonucleotide
ctttcacgccagggtctcagt

SEQ ID NO: 104 - DNA, 21 bp, Artificial Sequence
  Description of Artificial Sequence: Synthetic oligonucleotide
acgccagggtctcagtacagc

SEQ ID NO: 105 - DNA, 21 bp, Artificial Sequence
  Description of Artificial Sequence: Synthetic oligonucleotide
cggagggtctacggcgaggct

SEQ ID NO: 106 - DNA, 21 bp, Artificial Sequence
  Description of Artificial Sequence: Synthetic oligonucleotide
ttatctgttataggagctcaa

SEQ ID NO: 107 - DNA, 21 bp, Artificial Sequence
  Description of Artificial Sequence: Synthetic oligonucleotide
tctgttataggagctcaatct

SEQ ID NO: 108 - DNA, 21 bp, Artificial Sequence
  Description of Artificial Sequence: Synthetic oligonucleotide
tccaaaacatcgtactcctct

SEQ ID NO: 109 - DNA, 21 bp, Artificial Sequence
  Description of Artificial Sequence: Synthetic oligonucleotide
cccccatctcagggtcccggc

SEQ ID NO: 110 - DNA, 21 bp, Artificial Sequence
  Description of Artificial Sequence: Synthetic oligonucleotide
gacaagagacgtggccgggac

SEQ ID NO: 111 - DNA, 21 bp, Artificial Sequence
  Description of Artificial Sequence: Synthetic oligonucleotide
tctccctctaacgtcttcccg

SEQ ID NO: 112 - DNA, 21 bp, Artificial Sequence
  Description of Artificial Sequence: Synthetic oligonucleotide
cctggagatgcatactcacac

SEQ ID NO: 113 - DNA, 21 bp, Artificial Sequence
  Description of Artificial Sequence: Synthetic oligonucleotide
cagaagacagggatgaagaga

SEQ ID NO: 114 - DNA, 21 bp, Artificial Sequence
  Description of Artificial Sequence: Synthetic oligonucleotide
cactggaggtgcccgtgcaga

SEQ ID NO: 115 - DNA, 21 bp, Artificial Sequence
  Description of Artificial Sequence: Synthetic oligonucleotide
tgtgtgagtatgcatctccag

SEQ ID NO: 116 - DNA, 21 bp, Artificial Sequence
  Description of Artificial Sequence: Synthetic oligonucleotide
agcggcacaaggctcagctga

SEQ ID NO: 117 - DNA, 21 bp, Artificial Sequence
  Description of Artificial Sequence: Synthetic oligonucleotide
tgccgctgaaatccaaggcaa

SEQ ID NO: 118 - DNA, 21 bp, Artificial Sequence
  Description of Artificial Sequence: Synthetic oligonucleotide
tccatgctagcaatgcacgtg

SEQ ID NO: 119 - DNA, 21 bp, Artificial Sequence
  Description of Artificial Sequence: Synthetic oligonucleotide
ccatgctagcaatgcacgtgg

SEQ ID NO: 120 - DNA, 21 bp, Artificial Sequence
  Description of Artificial Sequence: Synthetic oligonucleotide
gtgtgtgagtatgcatctcca

SEQ ID NO: 121 - DNA, 21 bp, Artificial Sequence
  Description of Artificial Sequence: Synthetic oligonucleotide
gcctggagatgcatactcaca

SEQ ID NO: 122 - DNA, 21 bp, Artificial Sequence
  Description of Artificial Sequence: Synthetic oligonucleotide
ggcaggctgacagccaggtga

SEQ ID NO: 123 - DNA, 21 bp, Artificial Sequence
  Description of Artificial Sequence: Synthetic oligonucleotide
agtcacctggctgtcagcctg

SEQ ID NO: 124 - DNA, 21 bp, Artificial Sequence
  Description of Artificial Sequence: Synthetic oligonucleotide
ctagatgattccatctgcacg

SEQ ID NO: 125 - DNA, 21 bp, Artificial Sequence
  Description of Artificial Sequence: Synthetic oligonucleotide
ccttggatttcagcggcacaa

SEQ ID NO: 126 - DNA, 21 bp, Artificial Sequence
  Description of Artificial Sequence: Synthetic oligonucleotide
atttccactggaggtgcccgt

SEQ ID NO: 127 - DNA, 21 bp, Artificial Sequence
  Description of Artificial Sequence: Synthetic oligonucleotide
gatagtgaggttcacttgatt

SEQ ID NO: 128 - DNA, 21 bp, Artificial Sequence
  Description of Artificial Sequence: Synthetic oligonucleotide
cagatgtagagtcccgtgtcc

SEQ ID NO: 129 - DNA, 21 bp, Artificial Sequence
  Description of Artificial Sequence: Synthetic oligonucleotide
ctcaccaattacataaatctg

SEQ ID NO: 130 - DNA, 21 bp, Artificial Sequence
  Description of Artificial Sequence: Synthetic oligonucleotide
gctcaccaattacataaatct

SEQ ID NO: 131 - DNA, 21 bp, Artificial Sequence
  Description of Artificial Sequence: Synthetic oligonucleotide
gttttctgttgcagatccaga

SEQ ID NO: 132 - DNA, 21 bp, Artificial Sequence
  Description of Artificial Sequence: Synthetic oligonucleotide
ttttctgttgcagatccagaa

SEQ ID NO: 133 - DNA, 21 bp, Artificial Sequence
  Description of Artificial Sequence: Synthetic oligonucleotide
ctgttgcagatccagaaccgt

SEQ ID NO: 134 - DNA, 21 bp, Artificial Sequence
  Description of Artificial Sequence: Synthetic oligonucleotide
ctcctctggatccttgcagca

SEQ ID NO: 135 - DNA, 21 bp, Artificial Sequence
  Description of Artificial Sequence: Synthetic oligonucleotide
cagcagttagttcggggttgt

SEQ ID NO: 136 - DNA, 21 bp, Artificial Sequence
  Description of Artificial Sequence: Synthetic oligonucleotide
gatttcagcggcacaaggctc

SEQ ID NO: 137 - DNA, 21 bp, Artificial Sequence
  Description of Artificial Sequence: Synthetic oligonucleotide
tttatagctttctcctcacag

SEQ ID NO: 138 - DNA, 21 bp, Artificial Sequence
  Description of Artificial Sequence: Synthetic oligonucleotide
ctcctcacagctgtttctttg

SEQ ID NO: 139 - DNA, 21 bp, Artificial Sequence
  Description of Artificial Sequence: Synthetic oligonucleotide
tcctcacagctgtttctttga

SEQ ID NO: 140 - DNA, 21 bp, Artificial Sequence
  Description of Artificial Sequence: Synthetic oligonucleotide
gctcaaagaaacagctgtgag

SEQ ID NO: 141 - DNA, 21 bp, Artificial Sequence
  Description of Artificial Sequence: Synthetic oligonucleotide
tttttgtgtttgacagctaaa

SEQ ID NO: 142 - DNA, 21 bp, Artificial Sequence
  Description of Artificial Sequence: Synthetic oligonucleotide
tgtgtttgacagctaaagaaa

SEQ ID NO: 143 - DNA, 21 bp, Artificial Sequence
  Description of Artificial Sequence: Synthetic oligonucleotide
acagctaaagaaaagaagccc

SEQ ID NO: 144 - DNA, 21 bp, Artificial Sequence
  Description of Artificial Sequence: Synthetic oligonucleotide
cacatagacccctgttgtaag

SEQ ID NO: 145 - DNA, 21 bp, Artificial Sequence
  Description of Artificial Sequence: Synthetic oligonucleotide
cacattctggctctgttgggg

SEQ ID NO: 146 - DNA, 21 bp, Artificial Sequence
  Description of Artificial Sequence: Synthetic oligonucleotide
tcacattctggctctgttggg

SEQ ID NO: 147 - DNA, 21 bp, Artificial Sequence
  Description of Artificial Sequence: Synthetic oligonucleotide
agccttattttattcccatca

SEQ ID NO: 148 - DNA, 21 bp, Artificial Sequence
  Description of Artificial Sequence: Synthetic oligonucleotide
tcaattgatgggaataaaata

SEQ ID NO: 149 - DNA, 21 bp, Artificial Sequence
  Description of Artificial Sequence: Synthetic oligonucleotide
ttcttctcttcatccctgtct

SEQ ID NO: 150 - DNA, 21 bp, Artificial Sequence
  Description of Artificial Sequence: Synthetic oligonucleotide
gcagaagacagggatgaagag

SEQ ID NO: 151 - DNA, 21 bp, Artificial Sequence
  Description of Artificial Sequence: Synthetic oligonucleotide
ggcttttccatgctagcaatg

SEQ ID NO: 152 - DNA, 21 bp, Artificial Sequence
  Description of Artificial Sequence: Synthetic oligonucleotide
gcttttccatgctagcaatgc

SEQ ID NO: 153 - DNA, 21 bp, Artificial Sequence
  Description of Artificial Sequence: Synthetic oligonucleotide
gggtgcatacctgtctggctg

SEQ ID NO: 154 - DNA, 21 bp, Artificial Sequence
  Description of Artificial Sequence: Synthetic oligonucleotide
ggtcacctggatccctgggga

SEQ ID NO: 155 - DNA, 21 bp, Artificial Sequence
  Description of Artificial Sequence: Synthetic oligonucleotide
tcaggaccttggctggaggca

SEQ ID NO: 156 - DNA, 21 bp, Artificial Sequence
  Description of Artificial Sequence: Synthetic oligonucleotide
ccagccttggcaatgccagct

SEQ ID NO: 157 - DNA, 21 bp, Artificial Sequence
  Description of Artificial Sequence: Synthetic oligonucleotide
tgaggtgactccagtatctgg

SEQ ID NO: 158 - DNA, 21 bp, Artificial Sequence
  Description of Artificial Sequence: Synthetic oligonucleotide
ctgtttctgcagccgctttgg

SEQ ID NO: 159 - DNA, 21 bp, Artificial Sequence
  Description of Artificial Sequence: Synthetic oligonucleotide
cacagtgactgccagcccccc

SEQ ID NO: 160 - DNA, 21 bp, Artificial Sequence
  Description of Artificial Sequence: Synthetic oligonucleotide
gaactgctccttcagccgccc

SEQ ID NO: 161 - DNA, 21 bp, Artificial Sequence
  Description of Artificial Sequence: Synthetic oligonucleotide
agccgccctgaccgcccagcc

SEQ ID NO: 162 - DNA, 21 bp, Artificial Sequence
  Description of Artificial Sequence: Synthetic oligonucleotide
cgctaagtggtgatgggggga

SEQ ID NO: 163 - DNA, 21 bp, Artificial Sequence
  Description of Artificial Sequence: Synthetic oligonucleotide
ccgctaagtggtgatgggggg

SEQ ID NO: 164 - DNA, 21 bp, Artificial Sequence
  Description of Artificial Sequence: Synthetic oligonucleotide
gcggaaagcttcctcttcctg

SEQ ID NO: 165 - DNA, 21 bp, Artificial Sequence
  Description of Artificial Sequence: Synthetic oligonucleotide
gggcaggaagaggaagctttc

SEQ ID NO: 166 - DNA, 21 bp, Artificial Sequence
  Description of Artificial Sequence: Synthetic oligonucleotide
ctcttcctgccccaagtcagc

SEQ ID NO: 167 - DNA, 21 bp, Artificial Sequence
  Description of Artificial Sequence: Synthetic oligonucleotide
aacgtctccatcatgtataac

SEQ ID NO: 168 - DNA, 21 bp, Artificial Sequence
  Description of Artificial Sequence: Synthetic oligonucleotide
cttttctcttcaggtctggag

SEQ ID NO: 169 - DNA, 21 bp, Artificial Sequence
  Description of Artificial Sequence: Synthetic oligonucleotide
tgcagccgctttgggtggctc

SEQ ID NO: 170 - DNA, 21 bp, Artificial Sequence
  Description of Artificial Sequence: Synthetic oligonucleotide
ctcttcaggtctggagccccc

SEQ ID NO: 171 - DNA, 21 bp, Artificial Sequence
  Description of Artificial Sequence: Synthetic oligonucleotide
acagtgtacgctggagcaggt

SEQ ID NO: 172 - DNA, 21 bp, Artificial Sequence
  Description of Artificial Sequence: Synthetic oligonucleotide
gcagtgaggaaagaccgggtc

SEQ ID NO: 173 - DNA, 21 bp, Artificial Sequence
  Description of Artificial Sequence: Synthetic oligonucleotide
ctcactgccaagtggactcct

SEQ ID NO: 174 - DNA, 21 bp, Artificial Sequence
  Description of Artificial Sequence: Synthetic oligonucleotide
acccttcgactagaggatgtg

SEQ ID NO: 175 - DNA, 21 bp, Artificial Sequence
  Description of Artificial Sequence: Synthetic oligonucleotide
cccttcgactagaggatgtga

SEQ ID NO: 176 - DNA, 21 bp, Artificial Sequence
  Description of Artificial Sequence: Synthetic oligonucleotide
gactagaggatgtgagccagg

SEQ ID NO: 177 - DNA, 21 bp, Artificial Sequence
  Description of Artificial Sequence: Synthetic oligonucleotide
ccacctgaggctgacctgtga

SEQ ID NO: 178 - DNA, 21 bp, Artificial Sequence
  Description of Artificial Sequence: Synthetic oligonucleotide
cccacctgaggctgacctgtg

SEQ ID NO: 179 - DNA, 21 bp, Artificial Sequence
  Description of Artificial Sequence: Synthetic oligonucleotide
tactcttttcagtgactccca

SEQ ID NO: 180 - DNA, 21 bp, Artificial Sequence
  Description of Artificial Sequence: Synthetic oligonucleotide
acctggagccacccaaagcgg

SEQ ID NO: 181 - DNA, 21 bp, Artificial Sequence
  Description of Artificial Sequence: Synthetic oligonucleotide
cagtgactcccaaatcctttg

SEQ ID NO: 182 - DNA, 21 bp, Artificial Sequence
  Description of Artificial Sequence: Synthetic oligonucleotide
cccagggatccaggtgaccca

SEQ ID NO: 183 - DNA, 21 bp, Artificial Sequence
  Description of Artificial Sequence: Synthetic oligonucleotide
gggtcacctggatccctgggg

SEQ ID NO: 184 - DNA, 21 bp, Artificial Sequence
  Description of Artificial Sequence: Synthetic oligonucleotide
gtgaggtgactccagtatctg

SEQ ID NO: 185 - DNA, 21 bp, Artificial Sequence
  Description of Artificial Sequence: Synthetic oligonucleotide
gtgtggagctctctggacacc

SEQ ID NO: 186 - DNA, 21 bp, Artificial Sequence
  Description of Artificial Sequence: Synthetic oligonucleotide
tgtggagctctctggacaccc

SEQ ID NO: 187 - DNA, 21 bp, Artificial Sequence
  Description of Artificial Sequence: Synthetic oligonucleotide
gctggaggcacaggaggccca

SEQ ID NO: 188 - DNA, 21 bp, Artificial Sequence
  Description of Artificial Sequence: Synthetic oligonucleotide
gctcacctagtgaagcctctc

SEQ ID NO: 189 - DNA, 21 bp, Artificial Sequence
  Description of Artificial Sequence: Synthetic oligonucleotide
cccagccttggcaatgccagc

SEQ ID NO: 190 - DNA, 21 bp, Artificial Sequence
  Description of Artificial Sequence: Synthetic oligonucleotide
gcaatgccagctgtaccaggg

SEQ ID NO: 191 - DNA, 21 bp, Artificial Sequence
  Description of Artificial Sequence: Synthetic oligonucleotide
ttggagcagcagtgtacttca

SEQ ID NO: 192 - DNA, 21 bp, Artificial Sequence
  Description of Artificial Sequence: Synthetic oligonucleotide
acagagctgtctagcccaggt

SEQ ID NO: 193 - DNA, 21 bp, Artificial Sequence
  Description of Artificial Sequence: Synthetic oligonucleotide
ctccataggtgcccaacgctc

SEQ ID NO: 194 - DNA, 21 bp, Artificial Sequence
  Description of Artificial Sequence: Synthetic oligonucleotide
tccataggtgcccaacgctct

SEQ ID NO: 195 - DNA, 21 bp, Artificial Sequence
  Description of Artificial Sequence: Synthetic oligonucleotide
tcatccttggtgtcctttctc

SEQ ID NO: 196 - DNA, 21 bp, Artificial Sequence
  Description of Artificial Sequence: Synthetic oligonucleotide
gtgtcctttctctgctccttt

SEQ ID NO: 197 - DNA, 21 bp, Artificial Sequence
  Description of Artificial Sequence: Synthetic oligonucleotide
ctctgctccttttggtgactg

SEQ ID NO: 198 - DNA, 21 bp, Artificial Sequence
  Description of Artificial Sequence: Synthetic oligonucleotide
tgcgaagagcaggggtcactt

SEQ ID NO: 199 - DNA, 21 bp, Artificial Sequence
  Description of Artificial Sequence: Synthetic oligonucleotide
tggtgactggagcctttggct

SEQ ID NO: 200 - DNA, 21 bp, Artificial Sequence
  Description of Artificial Sequence: Synthetic oligonucleotide
ggtgactggagcctttggctt

SEQ ID NO: 201 - DNA, 21 bp, Artificial Sequence
  Description of Artificial Sequence: Synthetic oligonucleotide
ggctttcacctttggagaaga

SEQ ID NO: 202 - DNA, 21 bp, Artificial Sequence
  Description of Artificial Sequence: Synthetic oligonucleotide
gctttcacctttggagaagac

SEQ ID NO: 203 - DNA, 21 bp, Artificial Sequence
  Description of Artificial Sequence: Synthetic oligonucleotide
ctctaaggcagaaaatcgtct

SEQ ID NO: 204 - DNA, 21 bp, Artificial Sequence
  Description of Artificial Sequence: Synthetic oligonucleotide
ctgccttagagcaagggattc

SEQ ID NO: 205 - DNA, 21 bp, Artificial Sequence
  Description of Artificial Sequence: Synthetic oligonucleotide
gagcaagggattcaccctccg

SEQ ID NO: 206 - DNA, 21 bp, Artificial Sequence
  Description of Artificial Sequence: Synthetic oligonucleotide
ccgcccagtggcccgcccgct

SEQ ID NO: 207 - DNA, 21 bp, Artificial Sequence
  Description of Artificial Sequence: Synthetic oligonucleotide
tcgctatggctgcgcccagcc

SEQ ID NO: 208 - DNA, 21 bp, Artificial Sequence
  Description of Artificial Sequence: Synthetic oligonucleotide
tccttgcacagtgactgccag

SEQ ID NO: 209 - DNA, 21 bp, Artificial Sequence
  Description of Artificial Sequence: Synthetic oligonucleotide
gcacgaagctctccgatgtgt

SEQ ID NO: 210 - DNA, 21 bp, Artificial Sequence
  Description of Artificial Sequence: Synthetic oligonucleotide
tctgcagggacaataggagcc

SEQ ID NO: 211 - DNA, 21 bp, Artificial Sequence
  Description of Artificial Sequence: Synthetic oligonucleotide
cagtggcgagagaagaccccg

SEQ ID NO: 212 - DNA, 21 bp, Artificial Sequence
  Description of Artificial Sequence: Synthetic oligonucleotide
ctagcggaatgggcacctcat

SEQ ID NO: 213 - DNA, 21 bp, Artificial Sequence
  Description of Artificial Sequence: Synthetic oligonucleotide
gtgctaaactggtaccgcatg

SEQ ID NO: 214 - DNA, 21 bp, Artificial Sequence
  Description of Artificial Sequence: Synthetic oligonucleotide
aacctgacctgggacagtttc

SEQ ID NO: 215 - DNA, 21 bp, Artificial Sequence
  Description of Artificial Sequence: Synthetic oligonucleotide
tccgtctggttgctggggctc

SEQ ID NO: 216 - DNA, 21 bp, Artificial Sequence
  Description of Artificial Sequence: Synthetic oligonucleotide
cccgaggaccgcagccagccc

SEQ ID NO: 217 - DNA, 21 bp, Artificial Sequence
  Description of Artificial Sequence: Synthetic oligonucleotide
cgtgtcacacaactgcccaac

SEQ ID NO: 218 - DNA, 21 bp, Artificial Sequence
  Description of Artificial Sequence: Synthetic oligonucleotide
cacatgagcgtggtcagggcc

SEQ ID NO: 219 - DNA, 21 bp, Artificial Sequence
  Description of Artificial Sequence: Synthetic oligonucleotide
gatctgcgccttgggggccag

SEQ ID NO: 220 - DNA, 21 bp, Artificial Sequence
  Description of Artificial Sequence: Synthetic oligonucleotide
atctgcgccttgggggccagg

SEQ ID NO: 221 - DNA, 21 bp, Artificial Sequence
  Description of Artificial Sequence: Synthetic oligonucleotide
ggggccagggagatggcccca

SEQ ID NO: 222 - DNA, 21 bp, Artificial Sequence
  Description of Artificial Sequence: Synthetic oligonucleotide
gtgcccttccagagagaaggg

SEQ ID NO: 223 - DNA, 21 bp, Artificial Sequence
  Description of Artificial Sequence: Synthetic oligonucleotide
tgcccttccagagagaagggc

SEQ ID NO: 224 - DNA, 21 bp, Artificial Sequence
  Description of Artificial Sequence: Synthetic oligonucleotide
ccttccgctcacctccgcctg

SEQ ID NO: 225 - DNA, 21 bp, Artificial Sequence
  Description of Artificial Sequence: Synthetic oligonucleotide
cagagagaagggcagaagtgc

SEQ ID NO: 226 - DNA, 21 bp, Artificial Sequence
  Description of Artificial Sequence: Synthetic oligonucleotide
tgcccttctctctggaagggc

SEQ ID NO: 227 - DNA, 21 bp, Artificial Sequence
  Description of Artificial Sequence: Synthetic oligonucleotide
gaactggccggctggcctggg

SEQ ID NO: 228 - DNA, 21 bp, Artificial Sequence
  Description of Artificial Sequence: Synthetic oligonucleotide
ctcctcaaagaaggaggaccc

SEQ ID NO: 229 - DNA, 21 bp, Artificial Sequence
  Description of Artificial Sequence: Synthetic oligonucleotide
tcctcaaagaaggaggacccc

SEQ ID NO: 230 - DNA, 21 bp, Artificial Sequence
  Description of Artificial Sequence: Synthetic oligonucleotide
tctcgccactggaaatccagc

SEQ ID NO: 231 - DNA, 21 bp, Artificial Sequence
  Description of Artificial Sequence: Synthetic oligonucleotide
cctagcggaatgggcacctca

SEQ ID NO: 232 - DNA, 21 bp, Artificial Sequence
  Description of Artificial Sequence: Synthetic oligonucleotide
cgctcacctccgcctgagcag

SEQ ID NO: 233 - DNA, 21 bp, Artificial Sequence
  Description of Artificial Sequence: Synthetic oligonucleotide
gcccctctgaccggcttcctt

SEQ ID NO: 234 - DNA, 21 bp, Artificial Sequence
  Description of Artificial Sequence: Synthetic oligonucleotide
tccactgctcaggcggaggtg

SEQ ID NO: 235 - DNA, 21 bp, Artificial Sequence
  Description of Artificial Sequence: Synthetic oligonucleotide
tccccagccctgctcgtggtg

SEQ ID NO: 236 - DNA, 21 bp, Artificial Sequence
  Description of Artificial Sequence: Synthetic oligonucleotide
ggtcaccacgagcagggctgg

SEQ ID NO: 237 - DNA, 21 bp, Artificial Sequence
  Description of Artificial Sequence: Synthetic oligonucleotide
acctgcagcttctccaacaca

SEQ ID NO: 238 - DNA, 21 bp, Artificial Sequence
  Description of Artificial Sequence: Synthetic oligonucleotide
tccaacacatcggagagcttc

SEQ ID NO: 239 - DNA, 21 bp, Artificial Sequence
  Description of Artificial Sequence: Synthetic oligonucleotide
cctgacagcgaatcataacat

SEQ ID NO: 240 - DNA, 21 bp, Artificial Sequence
  Description of Artificial Sequence: Synthetic oligonucleotide
attccaacttacctaacggaa

SEQ ID NO: 241 - DNA, 21 bp, Artificial Sequence
  Description of Artificial Sequence: Synthetic oligonucleotide
tgtgcgcactggtgatgacaa

SEQ ID NO: 242 - DNA, 21 bp, Artificial Sequence
  Description of Artificial Sequence: Synthetic oligonucleotide
caatctgctcacctgcttgag

SEQ ID NO: 243 - DNA, 21 bp, Artificial Sequence
  Description of Artificial Sequence: Synthetic oligonucleotide
ttctagttgatcataccaggg

SEQ ID NO: 244 - DNA, 21 bp, Artificial Sequence
  Description of Artificial Sequence: Synthetic oligonucleotide
ataacttacctcaaattcttc

SEQ ID NO: 245 - DNA, 21 bp, Artificial Sequence
  Description of Artificial Sequence: Synthetic oligonucleotide
cctaacggaaagtgtgaagtc

SEQ ID NO: 246 - DNA, 21 bp, Artificial Sequence
  Description of Artificial Sequence: Synthetic oligonucleotide
cagacactacaacaacaggag

SEQ ID NO: 247 - DNA, 21 bp, Artificial Sequence
  Description of Artificial Sequence: Synthetic oligonucleotide
ggtggtttcatggacatctct

SEQ ID NO: 248 - DNA, 21 bp, Artificial Sequence
  Description of Artificial Sequence: Synthetic oligonucleotide
ccagagagatgtccatgaaac

SEQ ID NO: 249 - DNA, 21 bp, Artificial Sequence
  Description of Artificial Sequence: Synthetic oligonucleotide
tatgacctgtatggaggggag

SEQ ID NO: 250 - DNA, 21 bp, Artificial Sequence
  Description of Artificial Sequence: Synthetic oligonucleotide
cgactctgacagagctggtgg

SEQ ID NO: 251 - DNA, 21 bp, Artificial Sequence
  Description of Artificial Sequence: Synthetic oligonucleotide
cagaagcaggaggtgaagaac

SEQ ID NO: 252 - DNA, 21 bp, Artificial Sequence
  Description of Artificial Sequence: Synthetic oligonucleotide
actgccccccacccaggcctg

SEQ ID NO: 253 - DNA, 21 bp, Artificial Sequence
  Description of Artificial Sequence: Synthetic oligonucleotide
tgggccctactctgtgaccaa

SEQ ID NO: 254 - DNA, 21 bp, Artificial Sequence
  Description of Artificial Sequence: Synthetic oligonucleotide
accgagacctcagtgggctgg

SEQ ID NO: 255 - DNA, 21 bp, Artificial Sequence
  Description of Artificial Sequence: Synthetic oligonucleotide
tctaggtggtaccatggccac

SEQ ID NO: 256 - DNA, 21 bp, Artificial Sequence
  Description of Artificial Sequence: Synthetic oligonucleotide
gcctgcagcagcgtctctgcc

SEQ ID NO: 257 - DNA, 21 bp, Artificial Sequence
  Description of Artificial Sequence: Synthetic oligonucleotide
ttgtgcgtgagagcctcagcc

SEQ ID NO: 258 - DNA, 21 bp, Artificial Sequence
  Description of Artificial Sequence: Synthetic oligonucleotide
gtgctttctgtgctcagtgac

SEQ ID NO: 259 - DNA, 21 bp, Artificial Sequence
  Description of Artificial Sequence: Synthetic oligonucleotide
ggctggtcactgagcacagaa

SEQ ID NO: 260 - DNA, 21 bp, Artificial Sequence
  Description of Artificial Sequence: Synthetic oligonucleotide
ctgtgctcagtgaccagccca

SEQ ID NO: 261 - DNA, 21 bp, Artificial Sequence
  Description of Artificial Sequence: Synthetic oligonucleotide
tgtgctcagtgaccagcccaa

SEQ ID NO: 262 - DNA, 21 bp, Artificial Sequence
  Description of Artificial Sequence: Synthetic oligonucleotide
atgtgggtgaccctgagcggg

SEQ ID NO: 263 - DNA, 21 bp, Artificial Sequence
  Description of Artificial Sequence: Synthetic oligonucleotide
cctcgcacatgaccttgatgt

SEQ ID NO: 264 - DNA, 21 bp, Artificial Sequence
  Description of Artificial Sequence: Synthetic oligonucleotide
gctccccccagggtggacgct

SEQ ID NO: 265 - DNA, 21 bp, Artificial Sequence
  Description of Artificial Sequence: Synthetic oligonucleotide
agcagggtctctgcatccagc

SEQ ID NO: 266 - DNA, 21 bp, Artificial Sequence
  Description of Artificial Sequence: Synthetic oligonucleotide
gagaccttcgacagcctcacg

SEQ ID NO: 267 - DNA, 21 bp, Artificial Sequence
  Description of Artificial Sequence: Synthetic oligonucleotide
gacagcctcacggacctggtg

SEQ ID NO: 268 - DNA, 21 bp, Artificial Sequence
  Description of Artificial Sequence: Synthetic oligonucleotide
aagaagacggggattgaggag

SEQ ID NO: 269 - DNA, 21 bp, Artificial Sequence
  Description of Artificial Sequence: Synthetic oligonucleotide
ttgttcagttccaacactcgg

SEQ ID NO: 270 - DNA, 21 bp, Artificial Sequence
  Description of Artificial Sequence: Synthetic oligonucleotide
gctgtatcctcggactcctgc

SEQ ID NO: 271 - DNA, 21 bp, Artificial Sequence
  Description of Artificial Sequence: Synthetic oligonucleotide
cccacccacatctcagagttt

SEQ ID NO: 272 - DNA, 21 bp, Artificial Sequence
  Description of Artificial Sequence: Synthetic oligonucleotide
cagacgctggtgcaagttctt

SEQ ID NO: 273 - DNA, 21 bp, Artificial Sequence
  Description of Artificial Sequence: Synthetic oligonucleotide
caccagcgtctggaagggcag

SEQ ID NO: 274 - DNA, 21 bp, Artificial Sequence
  Description of Artificial Sequence: Synthetic oligonucleotide
ttctctggccgctgcccttcc

SEQ ID NO: 275 - DNA, 21 bp, Artificial Sequence
  Description of Artificial Sequence: Synthetic oligonucleotide
atgtagttggcattgatgtag

SEQ ID NO: 276 - DNA, 21 bp, Artificial Sequence
  Description of Artificial Sequence: Synthetic oligonucleotide
cgtccagaaccagctgctagg

SEQ ID NO: 277 - DNA, 21 bp, Artificial Sequence
  Description of Artificial Sequence: Synthetic oligonucleotide
tggcagatggcgtggcaggag

SEQ ID NO: 278 - DNA, 21 bp, Artificial Sequence
  Description of Artificial Sequence: Synthetic oligonucleotide
tccacctctcgggtggtcatg

SEQ ID NO: 279 - DNA, 21 bp, Artificial Sequence
  Description of Artificial Sequence: Synthetic oligonucleotide
ctccacctctcgggtggtcat

SEQ ID NO: 280 - DNA, 21 bp, Artificial Sequence
  Description of Artificial Sequence: Synthetic oligonucleotide
ccagaacaaatgcgtcccata

SEQ ID NO: 281 - DNA, 21 bp, Artificial Sequence
  Description of Artificial Sequence: Synthetic oligonucleotide
cagaacaaatgcgtcccatac

SEQ ID NO: 282 - DNA, 21 bp, Artificial Sequence
  Description of Artificial Sequence: Synthetic oligonucleotide
tattcggttgtgtcatgctcc

SEQ ID NO: 283 - DNA, 21 bp, Artificial Sequence
  Description of Artificial Sequence: Synthetic oligonucleotide
caggtctccccgctggacaat

SEQ ID NO: 284 - DNA, 21 bp, Artificial Sequence
  Description of Artificial Sequence: Synthetic oligonucleotide
ctggctcggcccagtcgcaag

SEQ ID NO: 285 - DNA, 21 bp, Artificial Sequence
  Description of Artificial Sequence: Synthetic oligonucleotide
gggagacctgattcgggagat

SEQ ID NO: 286 - DNA, 21 bp, Artificial Sequence
  Description of Artificial Sequence: Synthetic oligonucleotide
ctggaccagatcaaccagcgg

SEQ ID NO: 287 - DNA, 21 bp, Artificial Sequence
  Description of Artificial Sequence: Synthetic oligonucleotide
ctgccgctggttgatctggtc

SEQ ID NO: 288 - DNA, 21 bp, Artificial Sequence
  Description of Artificial Sequence: Synthetic oligonucleotide
cctgccgctggttgatctggt

SEQ ID NO: 289 - DNA, 21 bp, Artificial Sequence
  Description of Artificial Sequence: Synthetic oligonucleotide
gtggagatgttctccatgagc

SEQ ID NO: 290 - DNA, 21 bp, Artificial Sequence
  Description of Artificial Sequence: Synthetic oligonucleotide
tactgcgcctccgtctgcacc

SEQ ID NO: 291 - DNA, 21 bp, Artificial Sequence
  Description of Artificial Sequence: Synthetic oligonucleotide
aatgaactgggcgatggccac

SEQ ID NO: 292 - DNA, 21 bp, Artificial Sequence
  Description of Artificial Sequence: Synthetic oligonucleotide
ttcttagtggtttcaatgaac

SEQ ID NO: 293 - DNA, 21 bp, Artificial Sequence
  Description of Artificial Sequence: Synthetic oligonucleotide
tcccctccatacaggtcatag

SEQ ID NO: 294 - DNA, 21 bp, Artificial Sequence
  Description of Artificial Sequence: Synthetic oligonucleotide
gagtctagtgcagggaccgtg

SEQ ID NO: 295 - DNA, 21 bp, Artificial Sequence
  Description of Artificial Sequence: Synthetic oligonucleotide
cccccctgcacccggctgcag

SEQ ID NO: 296 - DNA, 21 bp, Artificial Sequence
  Description of Artificial Sequence: Synthetic oligonucleotide
tgtctgcagccgggtgcaggg

SEQ ID NO: 297 - DNA, 21 bp, Artificial Sequence
  Description of Artificial Sequence: Synthetic oligonucleotide
tcctccctcttgttcttagtg

SEQ ID NO: 298 - DNA, 21 bp, Artificial Sequence
  Description of Artificial Sequence: Synthetic oligonucleotide
ctcctccctcttgttcttagt

SEQ ID NO: 299 - DNA, 21 bp, Artificial Sequence
  Description of Artificial Sequence: Synthetic oligonucleotide
ttcactttctcctccctcttg

SEQ ID NO: 300 - DNA, 21 bp, Artificial Sequence
  Description of Artificial Sequence: Synthetic oligonucleotide
aggtggatgatggtgccgtcg

SEQ ID NO: 301 - DNA, 21 bp, Artificial Sequence
  Description of Artificial Sequence: Synthetic oligonucleotide
cctgacgctgccttctctagg

SEQ ID NO: 302 - DNA, 21 bp, Artificial Sequence
  Description of Artificial Sequence: Synthetic oligonucleotide
aggccttacctgaggcgaggg

SEQ ID NO: 303 - DNA, 21 bp, Artificial Sequence
  Description of Artificial Sequence: Synthetic oligonucleotide
gtcctccctctagtggctgag

SEQ ID NO: 304 - DNA, 21 bp, Artificial Sequence
  Description of Artificial Sequence: Synthetic oligonucleotide
gggtggcacatctccccatcc

SEQ ID NO: 305 - DNA, 21 bp, Artificial Sequence
  Description of Artificial Sequence: Synthetic oligonucleotide
tgcagagaaaggtggctctat

SEQ ID NO: 306 - DNA, 21 bp, Artificial Sequence
  Description of Artificial Sequence: Synthetic oligonucleotide
taatgctgacttggggtggca

SEQ ID NO: 307 - DNA, 21 bp, Artificial Sequence
  Description of Artificial Sequence: Synthetic oligonucleotide
cctgaggcgaggggagcctgc

SEQ ID NO: 308 - DNA, 21 bp, Artificial Sequence
  Description of Artificial Sequence: Synthetic oligonucleotide
aaggatggggagatgtgccac

SEQ ID NO: 309 - DNA, 21 bp, Artificial Sequence
  Description of Artificial Sequence: Synthetic oligonucleotide
aaggatcgagtggccccaggt

SEQ ID NO: 310 - DNA, 21 bp, Artificial Sequence
  Description of Artificial Sequence: Synthetic oligonucleotide
tgcatctatcacacctaccct

SEQ ID NO: 311 - DNA, 21 bp, Artificial Sequence
  Description of Artificial Sequence: Synthetic oligonucleotide
taggacctccaggaagattct

SEQ ID NO: 312 - DNA, 21 bp, Artificial Sequence
  Description of Artificial Sequence: Synthetic oligonucleotide
ctaggacctccaggaagattc

SEQ ID NO: 313 - DNA, 21 bp, Artificial Sequence
  Description of Artificial Sequence: Synthetic oligonucleotide
ctccagcaggaatacctgagc

SEQ ID NO: 314 - DNA, 21 bp, Artificial Sequence
  Description of Artificial Sequence: Synthetic oligonucleotide
gagccatggccgcgacgctgg

SEQ ID NO: 315 - DNA, 21 bp, Artificial Sequence
  Description of Artificial Sequence: Synthetic oligonucleotide
tagtcaacgcgaccaccacga

SEQ ID NO: 316 - DNA, 21 bp, Artificial Sequence
  Description of Artificial Sequence: Synthetic oligonucleotide
ctagtcaacgcgaccaccacg

SEQ ID NO: 317 - DNA, 21 bp, Artificial Sequence
  Description of Artificial Sequence: Synthetic oligonucleotide
tagtttgtttgtttttagaag

SEQ ID NO: 318 - DNA, 21 bp, Artificial Sequence
  Description of Artificial Sequence: Synthetic oligonucleotide
tttgtttttagaagaaagccc

SEQ ID NO: 319 - DNA, 21 bp, Artificial Sequence
  Description of Artificial Sequence: Synthetic oligonucleotide
tttttagaagaaagccctcag

SEQ ID NO: 320 - DNA, 21 bp, Artificial Sequence
  Description of Artificial Sequence: Synthetic oligonucleotide
tagaagaaagccctcagaatc

SEQ ID NO: 321 - DNA, 21 bp, Artificial Sequence
  Description of Artificial Sequence: Synthetic oligonucleotide
cacagaatggattctgagggc

SEQ ID NO: 322 - DNA, 21 bp, Artificial Sequence
  Description of Artificial Sequence: Synthetic oligonucleotide
ctcctgaggtcaccttccaca

SEQ ID NO: 323 - DNA, 21 bp, Artificial Sequence
  Description of Artificial Sequence: Synthetic oligonucleotide
ctgggggtgagggagcactgg

SEQ ID NO: 324 - DNA, 21 bp, Artificial Sequence
  Description of Artificial Sequence: Synthetic oligonucleotide
tgcctggacacagcttcctgg

SEQ ID NO: 325 - DNA, 21 bp, Artificial Sequence
  Description of Artificial Sequence: Synthetic oligonucleotide
gtcctcttccctaggaatgat

SEQ ID NO: 326 - DNA, 21 bp, Artificial Sequence
  Description of Artificial Sequence: Synthetic oligonucleotide
tgtaactcaggacattgaagt

SEQ ID NO: 327 - DNA, 21 bp, Artificial Sequence
  Description of Artificial Sequence: Synthetic oligonucleotide
aatgtcctgagttacagaagc

SEQ ID NO: 328 - DNA, 21 bp, Artificial Sequence
  Description of Artificial Sequence: Synthetic oligonucleotide
tattgtgcctgtcatcattcc

SEQ ID NO: 329 - DNA, 21 bp, Artificial Sequence
  Description of Artificial Sequence: Synthetic oligonucleotide
tctgcagaaatgttccccgtt

SEQ ID NO: 330 - DNA, 21 bp, Artificial Sequence
  Description of Artificial Sequence: Synthetic oligonucleotide
ctctgcagaaatgttccccgt

SEQ ID NO: 331 - DNA, 21 bp, Artificial Sequence
  Description of Artificial Sequence: Synthetic oligonucleotide
tgccgtggtggaggagaggtg

SEQ ID NO: 332 - DNA, 21 bp, Artificial Sequence
  Description of Artificial Sequence: Synthetic oligonucleotide
tggccatttgtaatgctgact

SEQ ID NO: 333 - DNA, 21 bp, Artificial Sequence
  Description of Artificial Sequence: Synthetic oligonucleotide
cttgtaagtagtagcagcagc

SEQ ID NO: 334 - DNA, 21 bp, Artificial Sequence
  Description of Artificial Sequence: Synthetic oligonucleotide
caaggatgcttaccaccaggg

SEQ ID NO: 335 - DNA, 21 bp, Artificial Sequence
  Description of Artificial Sequence: Synthetic oligonucleotide
taagtagtagcagcagcagca

SEQ ID NO: 336 - DNA, 21 bp, Artificial Sequence
  Description of Artificial Sequence: Synthetic oligonucleotide
ccaccaggggacatggcccag

SEQ ID NO: 337 - DNA, 21 bp, Artificial Sequence
  Description of Artificial Sequence: Synthetic oligonucleotide
aatgtggcaacgtggtgctca

SEQ ID NO: 338 - DNA, 21 bp, Artificial Sequence
  Description of Artificial Sequence: Synthetic oligonucleotide
tcttctgcaagctccatgttt

SEQ ID NO: 339 - DNA, 21 bp, Artificial Sequence
  Description of Artificial Sequence: Synthetic oligonucleotide
gccccagcagacgggcacgag

SEQ ID NO: 340 - DNA, 21 bp, Artificial Sequence
  Description of Artificial Sequence: Synthetic oligonucleotide
atcagtcctgagcaccacgtt

SEQ ID NO: 341 - DNA, 21 bp, Artificial Sequence
  Description of Artificial Sequence: Synthetic oligonucleotide
catcagtcctgagcaccacgt

SEQ ID NO: 342 - DNA, 21 bp, Artificial Sequence
  Description of Artificial Sequence: Synthetic oligonucleotide
gccagtatctggatgtccaat

SEQ ID NO: 343 - DNA, 21 bp, Artificial Sequence
  Description of Artificial Sequence: Synthetic oligonucleotide
cggaaatccccatttagccag

SEQ ID NO: 344 - DNA, 21 bp, Artificial Sequence
  Description of Artificial Sequence: Synthetic oligonucleotide
gcggaaatccccatttagcca

SEQ ID NO: 345 - DNA, 21 bp, Artificial Sequence
  Description of Artificial Sequence: Synthetic oligonucleotide
cgcaaaggagatgtgtccctg

SEQ ID NO: 346 - DNA, 21 bp, Artificial Sequence
  Description of Artificial Sequence: Synthetic oligonucleotide
gatccggcagcagtagatccc

SEQ ID NO: 347 - DNA, 21 bp, Artificial Sequence
  Description of Artificial Sequence: Synthetic oligonucleotide
tcatcattcattatgcctggg

SEQ ID NO: 348 - DNA, 21 bp, Artificial Sequence
  Description of Artificial Sequence: Synthetic oligonucleotide
cttctgcaagctccatgtttt

SEQ ID NO: 349 - DNA, 21 bp, Artificial Sequence
  Description of Artificial Sequence: Synthetic oligonucleotide
aggttaaatttttcatcattc

SEQ ID NO: 350 - DNA, 21 bp, Artificial Sequence
  Description of Artificial Sequence: Synthetic oligonucleotide
atgaccaacttcaggttaaat

SEQ ID NO: 351 - DNA, 21 bp, Artificial Sequence
  Description of Artificial Sequence: Synthetic oligonucleotide
acctgaagttggtcatcaaac

SEQ ID NO: 352 - DNA, 21 bp, Artificial Sequence
  Description of Artificial Sequence: Synthetic oligonucleotide
tgttgtttctgacattagcca

SEQ ID NO: 353 - DNA, 21 bp, Artificial Sequence
  Description of Artificial Sequence: Synthetic oligonucleotide
tgacattagccaaggtcaccc

SEQ ID NO: 354 - DNA, 21 bp, Artificial Sequence
  Description of Artificial Sequence: Synthetic oligonucleotide
gaaaggctgcagtgaagtctc

SEQ ID NO: 355 - DNA, 21 bp, Artificial Sequence
  Description of Artificial Sequence: Synthetic oligonucleotide
actgcagcctttccaaggatg

SEQ ID NO: 356 - DNA, 21 bp, Artificial Sequence
  Description of Artificial Sequence: Synthetic oligonucleotide
ccaaggatgcttaccaccagg

SEQ ID NO: 357 - DNA, 21 bp, Artificial Sequence
  Description of Artificial Sequence: Synthetic oligonucleotide
cacatcttccctttgactgtg

SEQ ID NO: 358 - DNA, 21 bp, Artificial Sequence
  Description of Artificial Sequence: Synthetic oligonucleotide
tatagcagagacacagacact

SEQ ID NO: 359 - DNA, 21 bp, Artificial Sequence
  Description of Artificial Sequence: Synthetic oligonucleotide
tatcagggaggctccccagtg

SEQ ID NO: 360 - DNA, 21 bp, Artificial Sequence
  Description of Artificial Sequence: Synthetic oligonucleotide
ctgttagatttatatcaggga

SEQ ID NO: 361 - DNA, 21 bp, Artificial Sequence
  Description of Artificial Sequence: Synthetic oligonucleotide
tgtttccatagcaaatatcca

SEQ ID NO: 362 - DNA, 21 bp, Artificial Sequence
  Description of Artificial Sequence: Synthetic oligonucleotide
catagcaaatatccacattgg

SEQ ID NO: 363 - DNA, 21 bp, Artificial Sequence
  Description of Artificial Sequence: Synthetic oligonucleotide
cgggactctggagcaaccatc

SEQ ID NO: 364 - DNA, 21 bp, Artificial Sequence
  Description of Artificial Sequence: Synthetic oligonucleotide
aaaattaaagcgccgaagata

SEQ ID NO: 365 - DNA, 21 bp, Artificial Sequence
  Description of Artificial Sequence: Synthetic oligonucleotide
catttgaaaattaaagcgccg

SEQ ID NO: 366 - DNA, 21 bp, Artificial Sequence
  Description of Artificial Sequence: Synthetic oligonucleotide
tgtttcccccttactagggta

SEQ ID NO: 367 - DNA, 21 bp, Artificial Sequence
  Description of Artificial Sequence: Synthetic oligonucleotide
gtttcccccttactagggtat

SEQ ID NO: 368 - DNA, 21 bp, Artificial Sequence
  Description of Artificial Sequence: Synthetic oligonucleotide
gactgtgtcctgctgctgctg

SEQ ID NO: 369 - DNA, 21 bp, Artificial Sequence
  Description of Artificial Sequence: Synthetic oligonucleotide
ccccttactagggtattctca

SEQ ID NO: 370 - DNA, 21 bp, Artificial Sequence
  Description of Artificial Sequence: Synthetic oligonucleotide
ctagggtattctcatagcaaa

SEQ ID NO: 371 - DNA, 21 bp, Artificial Sequence
  Description of Artificial Sequence: Synthetic oligonucleotide
aattctgtatcttctctttgc

SEQ ID NO: 372 - DNA, 21 bp, Artificial Sequence
  Description of Artificial Sequence: Synthetic oligonucleotide
atttccacagcctcatctctt

SEQ ID NO: 373 - DNA, 21 bp, Artificial Sequence
  Description of Artificial Sequence: Synthetic oligonucleotide
tttccacagcctcatctcttt

SEQ ID NO: 374 - DNA, 21 bp, Artificial Sequence
  Description of Artificial Sequence: Synthetic oligonucleotide
cacagcctcatctctttggcc

SEQ ID NO: 375 - DNA, 21 bp, Artificial Sequence
  Description of Artificial Sequence: Synthetic oligonucleotide
gccaacctccctccctcagga

SEQ ID NO: 376 - DNA, 21 bp, Artificial Sequence
  Description of Artificial Sequence: Synthetic oligonucleotide
ccaatcctgagggagggaggt

SEQ ID NO: 377 - DNA, 21 bp, Artificial Sequence
  Description of Artificial Sequence: Synthetic oligonucleotide
cttctgagcgaattccctctg

SEQ ID NO: 378 - DNA, 21 bp, Artificial Sequence
  Description of Artificial Sequence: Synthetic oligonucleotide
atatacgttctcttcaatggt

SEQ ID NO: 379 - DNA, 21 bp, Artificial Sequence
  Description of Artificial Sequence: Synthetic oligonucleotide
gggttgtcgctttgcaatgcc

SEQ ID NO: 380 - DNA, 21 bp, Artificial Sequence
  Description of Artificial Sequence: Synthetic oligonucleotide
ggttgtcgctttgcaatgcca

SEQ ID NO: 381 - DNA, 21 bp, Artificial Sequence
  Description of Artificial Sequence: Synthetic oligonucleotide
tctctctatgcagggtcctca

SEQ ID NO: 382 - DNA, 21 bp, Artificial Sequence
  Description of Artificial Sequence: Synthetic oligonucleotide
tacaccccagccgccccaggg

SEQ ID NO: 383 - DNA, 21 bp, Artificial Sequence
  Description of Artificial Sequence: Synthetic oligonucleotide
ccccagcagacgggcacgagg

SEQ ID NO: 384 - DNA, 21 bp, Artificial Sequence
  Description of Artificial Sequence: Synthetic oligonucleotide
ttaggatggccttctccgacg

SEQ ID NO: 385 - DNA, 20 bp, Artificial Sequence
  Description of Artificial Sequence: Synthetic primer
tggggaggtagctgcagaat

SEQ ID NO: 386 - DNA, 20 bp, Artificial Sequence
  Description of Artificial Sequence: Synthetic primer
tggggaggtagctgcagaat

SEQ ID NO: 387 - DNA, 20 bp, Artificial Sequence
  Description of Artificial Sequence: Synthetic primer
tggggatgtgttctcgtcac

SEQ ID NO: 388 - DNA, 20 bp, Artificial Sequence
  Description of Artificial Sequence: Synthetic primer
ggtagcacagggaggagaga

SEQ ID NO: 389 - DNA, 20 bp, Artificial Sequence
  Description of Artificial Sequence: Synthetic primer
ttagttgccaaggagcggag

SEQ ID NO: 390 - DNA, 20 bp, Artificial Sequence
  Description of Artificial Sequence: Synthetic primer
gcccttcctccaactttcca

SEQ ID NO: 391 - DNA, 20 bp, Artificial Sequence
  Description of Artificial Sequence: Synthetic primer
ggtagcacagggaggagaga

SEQ ID NO: 392 - DNA, 20 bp, Artificial Sequence
  Description of Artificial Sequence: Synthetic primer
cgtgtctggaggaccaagag

SEQ ID NO: 393 - DNA, 20 bp, Artificial Sequence
  Description of Artificial Sequence: Synthetic primer
ctggttgtgggcagagaagt

SEQ ID NO: 394 - DNA, 20 bp, Artificial Sequence
  Description of Artificial Sequence: Synthetic primer
tgcagctgggatgagaagtg

SEQ ID NO: 395 - DNA, 20 bp, Artificial Sequence
  Description of Artificial Sequence: Synthetic primer
tgcagctgggatgagaagtg

SEQ ID NO: 396 - DNA, 20 bp, Artificial Sequence
  Description of Artificial Sequence: Synthetic primer
ggcctcaccttactctgcag

SEQ ID NO: 397 - DNA, 20 bp, Artificial Sequence
  Description of Artificial Sequence: Synthetic primer
ggcctcaccttactctgcag

SEQ ID NO: 398 - DNA, 20 bp, Artificial Sequence
  Description of Artificial Sequence: Synthetic primer
ggcctcaccttactctgcag

SEQ ID NO: 399 - DNA, 20 bp, Artificial Sequence
  Description of Artificial Sequence: Synthetic primer
taaacccaagactctggcgg

SEQ ID NO: 400 - DNA, 20 bp, Artificial Sequence
  Description of Artificial Sequence: Synthetic primer
acagcacccatctaccaacg

SEQ ID NO: 401 - DNA, 20 bp, Artificial Sequence
  Description of Artificial Sequence: Synthetic primer
acagcacccatctaccaacg

SEQ ID NO: 402 - DNA, 20 bp, Artificial Sequence
  Description of Artificial Sequence: Synthetic primer
acagcacccatctaccaacg

SEQ ID NO: 403 - DNA, 20 bp, Artificial Sequence
  Description of Artificial Sequence: Synthetic primer
cagggggattattcctgggc

SEQ ID NO: 404 - DNA, 20 bp, Artificial Sequence
  Description of Artificial Sequence: Synthetic primer
tatggcgccctttgagacag

SEQ ID NO: 405 - DNA, 20 bp, Artificial Sequence
  Description of Artificial Sequence: Synthetic primer
gcccctgcccctctttttat

SEQ ID NO: 406 - DNA, 20 bp, Artificial Sequence
  Description of Artificial Sequence: Synthetic primer
gcccctgcccctctttttat

SEQ ID NO: 407 - DNA, 20 bp, Artificial Sequence
  Description of Artificial Sequence: Synthetic primer
tggttgcagagtgagctgag

SEQ ID NO: 408 - DNA, 20 bp, Artificial Sequence
  Description of Artificial Sequence: Synthetic primer
tggttgcagagtgagctgag

SEQ ID NO: 409 - DNA, 20 bp, Artificial Sequence
  Description of Artificial Sequence: Synthetic primer
gcccctgcccctctttttat

SEQ ID NO: 410 - DNA, 20 bp, Artificial Sequence
  Description of Artificial Sequence: Synthetic primer
ggtagcacagggaggagaga

SEQ ID NO: 411 - DNA, 20 bp, Artificial Sequence
  Description of Artificial Sequence: Synthetic primer
atcatgtaggttgccgcaca

SEQ ID NO: 412 - DNA, 20 bp, Artificial Sequence
  Description of Artificial Sequence: Synthetic primer
tcactgcctttgactgctga

SEQ ID NO: 413 - DNA, 20 bp, Artificial Sequence
  Description of Artificial Sequence: Synthetic primer
aaatctgggttccgttgcct

SEQ ID NO: 414 - DNA, 20 bp, Artificial Sequence
  Description of Artificial Sequence: Synthetic primer
ggccatgaaggagcatgagt

SEQ ID NO: 415 - DNA, 21 bp, Artificial Sequence
  Description of Artificial Sequence: Synthetic primer
agtccttgattctgtgtgggt

SEQ ID NO: 416 - DNA, 21 bp, Artificial Sequence
  Description of Artificial Sequence: Synthetic primer
cctcctccatcttcatgctcc

SEQ ID NO: 417 - DNA, 20 bp, Artificial Sequence
  Description of Artificial Sequence: Synthetic primer
aagctagaaggcagaagggc

SEQ ID NO: 418 - DNA, 20 bp, Artificial Sequence
  Description of Artificial Sequence: Synthetic primer
aagctagaaggcagaagggc

SEQ ID NO: 419 - DNA, 20 bp, Artificial Sequence
  Description of Artificial Sequence: Synthetic primer
ggccatgaaggagcatgagt

SEQ ID NO: 420 - DNA, 20 bp, Artificial Sequence
  Description of Artificial Sequence: Synthetic primer
ggccatgaaggagcatgagt

SEQ ID NO: 421 - DNA, 20 bp, Artificial Sequence
  Description of Artificial Sequence: Synthetic primer
catgctagcaatgcacgtgg

SEQ ID NO: 422 - DNA, 20 bp, Artificial Sequence
  Description of Artificial Sequence: Synthetic primer
catgctagcaatgcacgtgg

SEQ ID NO: 423 - DNA, 20 bp, Artificial Sequence
  Description of Artificial Sequence: Synthetic primer
catcgccagctttgtgtgtg

SEQ ID NO: 424 - DNA, 21 bp, Artificial Sequence
  Description of Artificial Sequence: Synthetic primer
agtccttgattctgtgtgggt

SEQ ID NO: 425 - DNA, 20 bp, Artificial Sequence
  Description of Artificial Sequence: Synthetic primer
aggtgactgaagtctgtgcg

SEQ ID NO: 426 - DNA, 20 bp, Artificial Sequence
  Description of Artificial Sequence: Synthetic primer
aggtgactgaagtctgtgcg

SEQ ID NO: 427 - DNA, 20 bp, Artificial Sequence
  Description of Artificial Sequence: Synthetic primer
aggtgactgaagtctgtgcg

SEQ ID NO: 428 - DNA, 20 bp, Artificial Sequence
  Description of Artificial Sequence: Synthetic primer
catctgcaaggtggagctca

SEQ ID NO: 429 - DNA, 20 bp, Artificial Sequence
  Description of Artificial Sequence: Synthetic primer
tctgcaaggtggagctcatg

SEQ ID NO: 430 - DNA, 21 bp, Artificial Sequence
  Description of Artificial Sequence: Synthetic primer
gcaatttaggggtggacctca

SEQ ID NO: 431 - DNA, 21 bp, Artificial Sequence
  Description of Artificial Sequence: Synthetic primer
gcaatttaggggtggacctca

SEQ ID NO: 432 - DNA, 20 bp, Artificial Sequence
  Description of Artificial Sequence: Synthetic primer
aatgttggggagtagagccc

SEQ ID NO: 433 - DNA, 22 bp, Artificial Sequence
  Description of Artificial Sequence: Synthetic primer
caatgttggggagtagagccct

SEQ ID NO: 434 - DNA, 20 bp, Artificial Sequence
  Description of Artificial Sequence: Synthetic primer
atgttggggagtagagccct

SEQ ID NO: 435 - DNA, 21 bp, Artificial Sequence
  Description of Artificial Sequence: Synthetic primer
agtccttgattctgtgtgggt

SEQ ID NO: 436 - DNA, 20 bp, Artificial Sequence
  Description of Artificial Sequence: Synthetic primer
atgttggggagtagagccct

SEQ ID NO: 437 - DNA, 20 bp, Artificial Sequence
  Description of Artificial Sequence: Synthetic primer
atgttggggagtagagccct

SEQ ID NO: 438 - DNA, 20 bp, Artificial Sequence
  Description of Artificial Sequence: Synthetic primer
atgttggggagtagagccct

SEQ ID NO: 439 - DNA, 20 bp, Artificial Sequence
  Description of Artificial Sequence: Synthetic primer
atgttggggagtagagccct

SEQ ID NO: 440 - DNA, 22 bp, Artificial Sequence
  Description of Artificial Sequence: Synthetic primer
agggacccaatatgtgttgagt

SEQ ID NO: 441 - DNA, 22 bp, Artificial Sequence
  Description of Artificial Sequence: Synthetic primer
agggacccaatatgtgttgagt

SEQ ID NO: 442 - DNA, 22 bp, Artificial Sequence
  Description of Artificial Sequence: Synthetic primer
agggacccaatatgtgttgagt

SEQ ID NO: 443 - DNA, 20 bp, Artificial Sequence
  Description of Artificial Sequence: Synthetic primer
tggttagaagtggcttccgt

SEQ ID NO: 444 - DNA, 20 bp, Artificial Sequence
  Description of Artificial Sequence: Synthetic primer
tggttagaagtggcttccgt

SEQ ID NO: 445 - DNA, 20 bp, Artificial Sequence
  Description of Artificial Sequence: Synthetic primer
tggttagaagtggcttccgt

SEQ ID NO: 446 - DNA, 20 bp, Artificial Sequence
  Description of Artificial Sequence: Synthetic primer
ccctcttacaacaggggtct

SEQ ID NO: 447 - DNA, 20 bp, Artificial Sequence
  Description of Artificial Sequence: Synthetic primer
ccctcttacaacaggggtct

SEQ ID NO: 448 - DNA, 20 bp, Artificial Sequence
  Description of Artificial Sequence: Synthetic primer
tgaagacctgaacaccgctc

SEQ ID NO: 449 - DNA, 20 bp, Artificial Sequence
  Description of Artificial Sequence: Synthetic primer
tgaagacctgaacaccgctc

SEQ ID NO: 450 - DNA, 20 bp, Artificial Sequence
  Description of Artificial Sequence: Synthetic primer
aagctagaaggcagaagggc

SEQ ID NO: 451 - DNA, 20 bp, Artificial Sequence
  Description of Artificial Sequence: Synthetic primer
aagctagaaggcagaagggc

SEQ ID NO: 452 - DNA, 20 bp, Artificial Sequence
  Description of Artificial Sequence: Synthetic primer
tagtgaagcctctccagcca

SEQ ID NO: 453 - DNA, 20 bp, Artificial Sequence
  Description of Artificial Sequence: Synthetic primer
ccaagtgagtgcagggtgat

SEQ ID NO: 454 - DNA, 20 bp, Artificial Sequence
  Description of Artificial Sequence: Synthetic primer
tggggaagctgctttgtgag

SEQ ID NO: 455 - DNA, 22 bp, Artificial Sequence
  Description of Artificial Sequence: Synthetic primer
ctggatccctggggaagctgct

SEQ ID NO: 456 - DNA, 20 bp, Artificial Sequence
  Description of Artificial Sequence: Synthetic primer
ccaagtgagtgcagggtgat

SEQ ID NO: 457 - DNA, 22 bp, Artificial Sequence
  Description of Artificial Sequence: Synthetic primer
ccttttggagggctcagcgctg

SEQ ID NO: 458 - DNA, 20 bp, Artificial Sequence
  Description of Artificial Sequence: Synthetic primer
ctgagatggggagagggtga

SEQ ID NO: 459 - DNA, 20 bp, Artificial Sequence
  Description of Artificial Sequence: Synthetic primer
tccagtgggctgatgaagtc

SEQ ID NO: 460 - DNA, 20 bp, Artificial Sequence
  Description of Artificial Sequence: Synthetic primer
tccagtgggctgatgaagtc

SEQ ID NO: 461 - DNA, 20 bp, Artificial Sequence
  Description of Artificial Sequence: Synthetic primer
ggatctctcagagcctccga

SEQ ID NO: 462 - DNA, 20 bp, Artificial Sequence
  Description of Artificial Sequence: Synthetic primer
ggatctctcagagcctccga

SEQ ID NO: 463 - DNA, 22 bp, Artificial Sequence
  Description of Artificial Sequence: Synthetic primer
gcccagcctctgtgcattggtt

SEQ ID NO: 464 - DNA, 22 bp, Artificial Sequence
  Description of Artificial Sequence: Synthetic primer
gcccagcctctgtgcattggtt

SEQ ID NO: 465 - DNA, 22 bp, Artificial Sequence
  Description of Artificial Sequence: Synthetic primer
gcccagcctctgtgcattggtt

SEQ ID NO: 466 - DNA, 20 bp, Artificial Sequence
  Description of Artificial Sequence: Synthetic primer
cttcctcttcctgccccaag

SEQ ID NO: 467 - DNA, 20 bp, Artificial Sequence
  Description of Artificial Sequence: Synthetic primer
tgagccagaccatctcctga

SEQ ID NO: 468 - DNA, 22 bp, Artificial Sequence
  Description of Artificial Sequence: Synthetic primer
ccttttggagggctcagcgctg

SEQ ID NO: 469 - DNA, 20 bp, Artificial Sequence
  Description of Artificial Sequence: Synthetic primer
tgagccagaccatctcctga

SEQ ID NO: 470 - DNA, 20 bp, Artificial Sequence
  Description of Artificial Sequence: Synthetic primer
tgagccagaccatctcctga

SEQ ID NO: 471 - DNA, 22 bp, Artificial Sequence
  Description of Artificial Sequence: Synthetic primer
gtctggagcccccaactccctt

SEQ ID NO: 472 - DNA, 22 bp, Artificial Sequence
  Description of Artificial Sequence: Synthetic primer
gtctggagcccccaactccctt

SEQ ID NO: 473 - DNA, 20 bp, Artificial Sequence
  Description of Artificial Sequence: Synthetic primer
gacccggtctttcctcactg

SEQ ID NO: 474 - DNA, 20 bp, Artificial Sequence
  Description of Artificial Sequence: Synthetic primer
gacccggtctttcctcactg

SEQ ID NO: 475 - DNA, 20 bp, Artificial Sequence
  Description of Artificial Sequence: Synthetic primer
gacccggtctttcctcactg

SEQ ID NO: 476 - DNA, 20 bp, Artificial Sequence
  Description of Artificial Sequence: Synthetic primer
tggcgactttacccttcgac

SEQ ID NO: 477 - DNA, 20 bp, Artificial Sequence
  Description of Artificial Sequence: Synthetic primer
tggcgactttacccttcgac

SEQ ID NO: 478 - DNA, 20 bp, Artificial Sequence
  Description of Artificial Sequence: Synthetic primer
ccaagtgagtgcagggtgat

SEQ ID NO: 479 - DNA, 22 bp, Artificial Sequence
  Description of Artificial Sequence: Synthetic primer
ccttttggagggctcagcgctg

SEQ ID NO: 480 - DNA, 20 bp, Artificial Sequence
  Description of Artificial Sequence: Synthetic primer
ccaagtgagtgcagggtgat

SEQ ID NO: 481 - DNA, 20 bp, Artificial Sequence
  Description of Artificial Sequence: Synthetic primer
ccaagtgagtgcagggtgat

SEQ ID NO: 482 - DNA, 20 bp, Artificial Sequence
  Description of Artificial Sequence: Synthetic primer
ccaagtgagtgcagggtgat

SEQ ID NO: 483 - DNA, 20 bp, Artificial Sequence
  Description of Artificial Sequence: Synthetic primer
ccaagtgagtgcagggtgat

SEQ ID NO: 484 - DNA, 20 bp, Artificial Sequence
  Description of Artificial Sequence: Synthetic primer
tcctttgggtcacctggatc

SEQ ID NO: 485 - DNA, 20 bp, Artificial Sequence
  Description of Artificial Sequence: Synthetic primer
tcctttgggtcacctggatc

SEQ ID NO: 486 - DNA, 20 bp, Artificial Sequence
  Description of Artificial Sequence: Synthetic primer
agaacgctttgtgtggagct

SEQ ID NO: 487 - DNA, 20 bp, Artificial Sequence
  Description of Artificial Sequence: Synthetic primer
ttcctgcaccctgtttctcc

SEQ ID NO: 488 - DNA, 20 bp, Artificial Sequence
  Description of Artificial Sequence: Synthetic primer
agaacgctttgtgtggagct

SEQ ID NO: 489 - DNA, 22 bp, Artificial Sequence
  Description of Artificial Sequence: Synthetic primer
ctggatccctggggaagctgct

SEQ ID NO: 490 - DNA, 20 bp, Artificial Sequence
  Description of Artificial Sequence: Synthetic primer
tttctcaggaccttggctgg

SEQ ID NO: 491 - DNA, 20 bp, Artificial Sequence
  Description of Artificial Sequence: Synthetic primer
ctttcccagccttggcaatg

SEQ ID NO: 492 - DNA, 20 bp, Artificial Sequence
  Description of Artificial Sequence: Synthetic primer
gctgaatgaccctgggacaa

SEQ ID NO: 493 - DNA, 20 bp, Artificial Sequence
  Description of Artificial Sequence: Synthetic primer
gctgaatgaccctgggacaa

SEQ ID NO: 494 - DNA, 22 bp, Artificial Sequence
  Description of Artificial Sequence: Synthetic primer
ccataggtgcccaacgctctgg

SEQ ID NO: 495 - DNA, 22 bp, Artificial Sequence
  Description of Artificial Sequence: Synthetic primer
ccataggtgcccaacgctctgg

SEQ ID NO: 496 - DNA, 22 bp, Artificial Sequence
  Description of Artificial Sequence: Synthetic primer
ccataggtgcccaacgctctgg

SEQ ID NO: 497 - DNA, 20 bp, Artificial Sequence
  Description of Artificial Sequence: Synthetic primer
ggcctctcttttgctcacct

SEQ ID NO: 498 - DNA, 22 bp, Artificial Sequence
  Description of Artificial Sequence: Synthetic primer
ccataggtgcccaacgctctgg

SEQ ID NO: 499 - DNA, 22 bp, Artificial Sequence
  Description of Artificial Sequence: Synthetic primer
ccataggtgcccaacgctctgg

SEQ ID NO: 500 - DNA, 22 bp, Artificial Sequence
  Description of Artificial Sequence: Synthetic primer
ccataggtgcccaacgctctgg

SEQ ID NO: 501 - DNA, 22 bp, Artificial Sequence
  Description of Artificial Sequence: Synthetic primer
ccataggtgcccaacgctctgg

SEQ ID NO: 502 - DNA, 20 bp, Artificial Sequence
  Description of Artificial Sequence: Synthetic primer
catccttctcctccttccgc

SEQ ID NO: 503 - DNA, 20 bp, Artificial Sequence
  Description of Artificial Sequence: Synthetic primer
catccttctcctccttccgc

SEQ ID NO: 504 - DNA, 20 bp, Artificial Sequence
  Description of Artificial Sequence: Synthetic primer
catccttctcctccttccgc

SEQ ID NO: 505 - DNA, 20 bp, Artificial Sequence
  Description of Artificial Sequence: Synthetic primer
gacggttggtggtcaagaga

SEQ ID NO: 506 - DNA, 18 bp, Artificial Sequence
  Description of Artificial Sequence: Synthetic primer
cgctacacggtgctgagc

SEQ ID NO: 507 - DNA, 20 bp, Artificial Sequence
  Description of Artificial Sequence: Synthetic primer
ctgagatggggagagggtga

SEQ ID NO: 508 - DNA, 22 bp, Artificial Sequence
  Description of Artificial Sequence: Synthetic primer
tctctcagactccccagacagg

SEQ ID NO: 509 - DNA, 22 bp, Artificial Sequence
  Description of Artificial Sequence: Synthetic primer
ctaagtccctgatgaaggcccc

SEQ ID NO: 510 - DNA, 22 bp, Artificial Sequence
  Description of Artificial Sequence: Synthetic primer
gctgactccctctccctttctc

SEQ ID NO: 511 - DNA, 22 bp, Artificial Sequence
  Description of Artificial Sequence: Synthetic primer
tctctgtggactatggggagct

SEQ ID NO: 512 - DNA, 22 bp, Artificial Sequence
  Description of Artificial Sequence: Synthetic primer
ctgcagcttctccaacacatcg

SEQ ID NO: 513 - DNA, 20 bp, Artificial Sequence
  Description of Artificial Sequence: Synthetic primer
gatgtggaggaagagggggc

SEQ ID NO: 514 - DNA, 22 bp, Artificial Sequence
  Description of Artificial Sequence: Synthetic primer
ctgcagcttctccaacacatcg

SEQ ID NO: 515 - DNA, 22 bp, Artificial Sequence
  Description of Artificial Sequence: Synthetic primer
ctgcagcttctccaacacatcg

SEQ ID NO: 516 - DNA, 22 bp, Artificial Sequence
  Description of Artificial Sequence: Synthetic primer
ctgcagcttctccaacacatcg

SEQ ID NO: 517 - DNA, 22 bp, Artificial Sequence
  Description of Artificial Sequence: Synthetic primer
ctgcagcttctccaacacatcg

SEQ ID NO: 518 - DNA, 20 bp, Artificial Sequence
  Description of Artificial Sequence: Synthetic primer
gcgtgacttccacatgagcg

SEQ ID NO: 519 - DNA, 20 bp, Artificial Sequence
  Description of Artificial Sequence: Synthetic primer
gcgtgacttccacatgagcg

SEQ ID NO: 520 - DNA, 20 bp, Artificial Sequence
  Description of Artificial Sequence: Synthetic primer
gcgtgacttccacatgagcg

SEQ ID NO: 521 - DNA, 21 bp, Artificial Sequence
  Description of Artificial Sequence: Synthetic primer
ctctagtctgccctcacccct

SEQ ID NO: 522 - DNA, 21 bp, Artificial Sequence
  Description of Artificial Sequence: Synthetic primer
ctctagtctgccctcacccct

SEQ ID NO: 523 - DNA, 20 bp, Artificial Sequence
  Description of Artificial Sequence: Synthetic primer
gatgtggaggaagagggggc

SEQ ID NO: 524 - DNA, 21 bp, Artificial Sequence
  Description of Artificial Sequence: Synthetic primer
ctctagtctgccctcacccct

SEQ ID NO: 525 - DNA, 21 bp, Artificial Sequence
  Description of Artificial Sequence: Synthetic primer
ctctagtctgccctcacccct

SEQ ID NO: 526 - DNA, 21 bp, Artificial Sequence
  Description of Artificial Sequence: Synthetic primer
ctctagtctgccctcacccct

SEQ ID NO: 527 - DNA, 22 bp, Artificial Sequence
  Description of Artificial Sequence: Synthetic primer
cagctcagggtaagcagctcat

SEQ ID NO: 528 - DNA, 22 bp, Artificial Sequence
  Description of Artificial Sequence: Synthetic primer
cagctcagggtaagcagctcat

SEQ ID NO: 529 - DNA, 22 bp, Artificial Sequence
  Description of Artificial Sequence: Synthetic primer
gctgactccctctccctttctc

SEQ ID NO: 530 - DNA, 22 bp, Artificial Sequence
  Description of Artificial Sequence: Synthetic primer
tctctgtggactatggggagct

SEQ ID NO: 531 - DNA, 20 bp, Artificial Sequence
  Description of Artificial Sequence: Synthetic primer
gatgtggaggaagagggggc

SEQ ID NO: 532 - DNA, 22 bp, Artificial Sequence
  Description of Artificial Sequence: Synthetic primer
gccaccattgtctttcctagcg

SEQ ID NO: 533 - DNA, 20 bp, Artificial Sequence
  Description of Artificial Sequence: Synthetic primer
gatgtggaggaagagggggc

SEQ ID NO: 534 - DNA, 22 bp, Artificial Sequence
  Description of Artificial Sequence: Synthetic primer
tctctcagactccccagacagg

SEQ ID NO: 535 - DNA, 22 bp, Artificial Sequence
  Description of Artificial Sequence: Synthetic primer
tctctcagactccccagacagg

SEQ ID NO: 536 - DNA, 22 bp, Artificial Sequence
  Description of Artificial Sequence: Synthetic primer
tctctcagactccccagacagg

SEQ ID NO: 537 - DNA, 22 bp, Artificial Sequence
  Description of Artificial Sequence: Synthetic primer
tctctcagactccccagacagg

SEQ ID NO: 538 - DNA, 21 bp, Artificial Sequence
  Description of Artificial Sequence: Synthetic primer
tggtgtctgtcttctgtcagc

SEQ ID NO: 539 - DNA, 22 bp, Artificial Sequence
  Description of Artificial Sequence: Synthetic primer
cgaaatgcaggcagcaagctat

SEQ ID NO: 540 - DNA, 21 bp, Artificial Sequence
  Description of Artificial Sequence: Synthetic primer
ctctgggaaagaagcagagaa

SEQ ID NO: 541 - DNA, 24 bp, Artificial Sequence
  Description of Artificial Sequence: Synthetic primer
ttctgtctacctctgtatgtttgc

SEQ ID NO: 542 - DNA, 21 bp, Artificial Sequence
  Description of Artificial Sequence: Synthetic primer
cttggactaggctggggagta

SEQ ID NO: 543 - DNA, 23 bp, Artificial Sequence
  Description of Artificial Sequence: Synthetic primer
aggacgtcagtttcaagtctctc

SEQ ID NO: 544 - DNA, 23 bp, Artificial Sequence
  Description of Artificial Sequence: Synthetic primer
tccaagcatggttttaccacttc

SEQ ID NO: 545 - DNA, 23 bp, Artificial Sequence
  Description of Artificial Sequence: Synthetic primer
cgcacacaattctgaacatttcc

SEQ ID NO: 546 - DNA, 25 bp, Artificial Sequence
  Description of Artificial Sequence: Synthetic primer
cccttggaggaatgtgtctactttt

SEQ ID NO: 547 - DNA, 23 bp, Artificial Sequence
  Description of Artificial Sequence: Synthetic primer
gaacaaaatctccagggtggctc

SEQ ID NO: 548 - DNA, 21 bp, Artificial Sequence
  Description of Artificial Sequence: Synthetic primer
ctctactcctgcaccgactgg

SEQ ID NO: 549 - DNA, 20 bp, Artificial Sequence
  Description of Artificial Sequence: Synthetic primer
gggggatcaggtgacccata

SEQ ID NO: 550 - DNA, 20 bp, Artificial Sequence
  Description of Artificial Sequence: Synthetic primer
cccgatggatgccctctttg

SEQ ID NO: 551 - DNA, 20 bp, Artificial Sequence
  Description of Artificial Sequence: Synthetic primer
gcacaggcaccatcattgtc

SEQ ID NO: 552 - DNA, 20 bp, Artificial Sequence
  Description of Artificial Sequence: Synthetic primer
cgaccctccctttccagaac

SEQ ID NO: 553 - DNA, 20 bp, Artificial Sequence
  Description of Artificial Sequence: Synthetic primer
gatggtgaggtaagggcctg

SEQ ID NO: 554 - DNA, 20 bp, Artificial Sequence
  Description of Artificial Sequence: Synthetic primer
ggcccctctctgtgaatgtc

SEQ ID NO: 555 - DNA, 20 bp, Artificial Sequence
  Description of Artificial Sequence: Synthetic primer
gtggcctgggtcttaccttc

SEQ ID NO: 556 - DNA, 20 bp, Artificial Sequence
  Description of Artificial Sequence: Synthetic primer
gtggcctgggtcttaccttc

SEQ ID NO: 557 - DNA, 20 bp, Artificial Sequence
  Description of Artificial Sequence: Synthetic primer
gtggcctgggtcttaccttc

SEQ ID NO: 558 - DNA, 20 bp, Artificial Sequence
  Description of Artificial Sequence: Synthetic primer
gtggcctgggtcttaccttc

SEQ ID NO: 559 - DNA, 20 bp, Artificial Sequence
  Description of Artificial Sequence: Synthetic primer
gtggcctgggtcttaccttc

SEQ ID NO: 560 - DNA, 20 bp, Artificial Sequence
  Description of Artificial Sequence: Synthetic primer
gtggcctgggtcttaccttc

SEQ ID NO: 561 - DNA, 20 bp, Artificial Sequence
  Description of Artificial Sequence: Synthetic primer
ctggacgtttcttgtgcgtg

SEQ ID NO: 562 - DNA, 20 bp, Artificial Sequence
  Description of Artificial Sequence: Synthetic primer
ctggacgtttcttgtgcgtg

SEQ ID NO: 563 - DNA, 22 bp, Artificial Sequence
  Description of Artificial Sequence: Synthetic primer
ggagggtctgcctgggcttgaa

SEQ ID NO: 564 - DNA, 20 bp, Artificial Sequence
  Description of Artificial Sequence: Synthetic primer
gatggtgaggtaagggcctg

SEQ ID NO: 565 - DNA, 20 bp, Artificial Sequence
  Description of Artificial Sequence: Synthetic primer
ctgaggctcctgtctgtgac

SEQ ID NO: 566 - DNA, 21 bp, Artificial Sequence
  Description of Artificial Sequence: Synthetic primer
ctcaagtcctgtgaatggcct

SEQ ID NO: 567 - DNA, 21 bp, Artificial Sequence
  Description of Artificial Sequence: Synthetic primer
ctcaagtcctgtgaatggcct

SEQ ID NO: 568 - DNA, 20 bp, Artificial Sequence
  Description of Artificial Sequence: Synthetic primer
gacttctcgctcttccccac

SEQ ID NO: 569 - DNA, 20 bp, Artificial Sequence
  Description of Artificial Sequence: Synthetic primer
gacttctcgctcttccccac

SEQ ID NO: 570 - DNA, 19 bp, Artificial Sequence
  Description of Artificial Sequence: Synthetic primer
gacaccttcccctccttgc

SEQ ID NO: 571 - DNA, 20 bp, Artificial Sequence
  Description of Artificial Sequence: Synthetic primer
ccgatggatgccctctttgg

SEQ ID NO: 572 - DNA, 20 bp, Artificial Sequence
  Description of Artificial Sequence: Synthetic primer
gctgatgctcatttccccac

SEQ ID NO: 573 - DNA, 20 bp, Artificial Sequence
  Description of Artificial Sequence: Synthetic primer
gatgctcatttccccaccca

SEQ ID NO: 574 - DNA, 22 bp, Artificial Sequence
  Description of Artificial Sequence: Synthetic primer
ctctccgcccactcccagttga

SEQ ID NO: 575 - DNA, 22 bp, Artificial Sequence
  Description of Artificial Sequence: Synthetic primer
cttgcatgggtgagggtggcag

SEQ ID NO: 576 - DNA, 22 bp, Artificial Sequence
  Description of Artificial Sequence: Synthetic primer
gctcactgtcttggggtgcgtc

SEQ ID NO: 577 - DNA, 22 bp, Artificial Sequence
  Description of Artificial Sequence: Synthetic primer
gctcactgtcttggggtgcgtc

SEQ ID NO: 578 - DNA, 22 bp, Artificial Sequence
  Description of Artificial Sequence: Synthetic primer
gctcactgtcttggggtgcgtc

SEQ ID NO: 579 - DNA, 20 bp, Artificial Sequence
  Description of Artificial Sequence: Synthetic primer
cccatccgtccatccaacaa

SEQ ID NO: 580 - DNA, 20 bp, Artificial Sequence
  Description of Artificial Sequence: Synthetic primer
cccatccgtccatccaacaa

SEQ ID NO: 581 - DNA, 20 bp, Artificial Sequence
  Description of Artificial Sequence: Synthetic primer
cgaccctccctttccagaac

SEQ ID NO: 582 - DNA, 20 bp, Artificial Sequence
  Description of Artificial Sequence: Synthetic primer
ggccctactctgtgaccaac

SEQ ID NO: 583 - DNA, 20 bp, Artificial Sequence
  Description of Artificial Sequence: Synthetic primer
cacggtagacaggaggcaag

SEQ ID NO: 584 - DNA, 20 bp, Artificial Sequence
  Description of Artificial Sequence: Synthetic primer
gtcgggtagggtgagatgga

SEQ ID NO: 585 - DNA, 20 bp, Artificial Sequence
  Description of Artificial Sequence: Synthetic primer
cctgattcgggagatctggc

SEQ ID NO: 586 - DNA, 20 bp, Artificial Sequence
  Description of Artificial Sequence: Synthetic primer
cctgattcgggagatctggc

SEQ ID NO: 587 - DNA, 20 bp, Artificial Sequence
  Description of Artificial Sequence: Synthetic primer
cctgattcgggagatctggc

SEQ ID NO: 588 - DNA, 20 bp, Artificial Sequence
  Description of Artificial Sequence: Synthetic primer
gcttgactggcctctgatgg

SEQ ID NO: 589 - DNA, 20 bp, Artificial Sequence
  Description of Artificial Sequence: Synthetic primer
ggcctggactgtgacattga

SEQ ID NO: 590 - DNA, 20 bp, Artificial Sequence
  Description of Artificial Sequence: Synthetic primer
ggcctggactgtgacattga

SEQ ID NO: 591 - DNA, 20 bp, Artificial Sequence
  Description of Artificial Sequence: Synthetic primer
ggcctggactgtgacattga

SEQ ID NO: 592 - DNA, 21 bp, Artificial Sequence
  Description of Artificial Sequence: Synthetic primer
ctctactcctgcaccgactgg

SEQ ID NO: 593 - DNA, 20 bp, Artificial Sequence
  Description of Artificial Sequence: Synthetic primer
ttcaggcttggttctcaccc

SEQ ID NO: 594 - DNA, 20 bp, Artificial Sequence
  Description of Artificial Sequence: Synthetic primer
gcctctgtcctctaggagct

SEQ ID NO: 595 - DNA, 20 bp, Artificial Sequence
  Description of Artificial Sequence: Synthetic primer
gcctctgtcctctaggagct

SEQ ID NO: 596 - DNA, 20 bp, Artificial Sequence
  Description of Artificial Sequence: Synthetic primer
ctgtgctgtctcctgacctg

SEQ ID NO: 597 - DNA, 20 bp, Artificial Sequence
  Description of Artificial Sequence: Synthetic primer
ctgtgctgtctcctgacctg

SEQ ID NO: 598 - DNA, 20 bp, Artificial Sequence
  Description of Artificial Sequence: Synthetic primer
ctgtgctgtctcctgacctg

SEQ ID NO: 599 - DNA, 20 bp, Artificial Sequence
  Description of Artificial Sequence: Synthetic primer
atggaggggagaagtttgcg

SEQ ID NO: 600 - DNA, 20 bp, Artificial Sequence
  Description of Artificial Sequence: Synthetic primer
ggcccctctctgtgaatgtc

SEQ ID NO: 601 - DNA, 20 bp, Artificial Sequence
  Description of Artificial Sequence: Synthetic primer
aagaggccacatctgcttcc

SEQ ID NO: 602 - DNA, 20 bp, Artificial Sequence
  Description of Artificial Sequence: Synthetic primer
ggctccagtcccatggttac

SEQ ID NO: 603 - DNA, 20 bp, Artificial Sequence
  Description of Artificial Sequence: Synthetic primer
atgtcacctctcctccacca

SEQ ID NO: 604 - DNA, 20 bp, Artificial Sequence
  Description of Artificial Sequence: Synthetic primer
cccaggactcacatgtgctt

SEQ ID NO: 605 - DNA, 20 bp, Artificial Sequence
  Description of Artificial Sequence: Synthetic primer
atgtcacctctcctccacca

SEQ ID NO: 606 - DNA, 20 bp, Artificial Sequence
  Description of Artificial Sequence: Synthetic primer
aagaggccacatctgcttcc

SEQ ID NO: 607 - DNA, 20 bp, Artificial Sequence
  Description of Artificial Sequence: Synthetic primer
atgtcacctctcctccacca

SEQ ID NO: 608 - DNA, 20 bp, Artificial Sequence
  Description of Artificial Sequence: Synthetic primer
atgtcacctctcctccacca

SEQ ID NO: 609 - DNA, 20 bp, Artificial Sequence
  Description of Artificial Sequence: Synthetic primer
ggcacatctccccatccttc

SEQ ID NO: 610 - DNA, 20 bp, Artificial Sequence
  Description of Artificial Sequence: Synthetic primer
ggcacatctccccatccttc

SEQ ID NO: 611 - DNA, 20 bp, Artificial Sequence
  Description of Artificial Sequence: Synthetic primer
ggcacatctccccatccttc

SEQ ID NO: 612 - DNA, 20 bp, Artificial Sequence
  Description of Artificial Sequence: Synthetic primer
ggcacatctccccatccttc

SEQ ID NO: 613 - DNA, 20 bp, Artificial Sequence
  Description of Artificial Sequence: Synthetic primer
ggttacacaaagggcttggc

SEQ ID NO: 614 - DNA, 20 bp, Artificial Sequence
  Description of Artificial Sequence: Synthetic primer
gtcctccctctagtggctga

SEQ ID NO: 615 - DNA, 20 bp, Artificial Sequence
  Description of Artificial Sequence: Synthetic primer
gtcctccctctagtggctga

SEQ ID NO: 616 - DNA, 20 bp, Artificial Sequence
  Description of Artificial Sequence: Synthetic primer
agctgtaacgcggttgagaa

SEQ ID NO: 617 - DNA, 20 bp, Artificial Sequence
  Description of Artificial Sequence: Synthetic primer
agctgtaacgcggttgagaa

SEQ ID NO: 618 - DNA, 23 bp, Artificial Sequence
  Description of Artificial Sequence: Synthetic primer
agtttgctggtgtgcatgtgtgt

SEQ ID NO: 619 - DNA, 23 bp, Artificial Sequence
  Description of Artificial Sequence: Synthetic primer
agtttgctggtgtgcatgtgtgt

SEQ ID NO: 620 - DNA, 23 bp, Artificial Sequence
  Description of Artificial Sequence: Synthetic primer
agtttgctggtgtgcatgtgtgt

SEQ ID NO: 621 - DNA, 23 bp, Artificial Sequence
  Description of Artificial Sequence: Synthetic primer
agtttgctggtgtgcatgtgtgt

SEQ ID NO: 622 - DNA, 22 bp, Artificial Sequence
  Description of Artificial Sequence: Synthetic primer
agaagaaagccctcagaatcca

SEQ ID NO: 623 - DNA, 20 bp, Artificial Sequence
  Description of Artificial Sequence: Synthetic primer
tgtggaaggtgacctcagga

SEQ ID NO: 624 - DNA, 20 bp, Artificial Sequence
  Description of Artificial Sequence: Synthetic primer
ggaggagcaacaggatggac

SEQ ID NO: 625 - DNA, 20 bp, Artificial Sequence
  Description of Artificial Sequence: Synthetic primer
gaagctgtgtccaggcagaa

SEQ ID NO: 626 - DNA, 20 bp, Artificial Sequence
  Description of Artificial Sequence: Synthetic primer
gaagctgtgtccaggcagaa

SEQ ID NO: 627 - DNA, 20 bp, Artificial Sequence
  Description of Artificial Sequence: Synthetic primer
ggaggagcaacaggatggac

SEQ ID NO: 628 - DNA, 20 bp, Artificial Sequence
  Description of Artificial Sequence: Synthetic primer
cccaggactcacatgtgctt

SEQ ID NO: 629 - DNA, 20 bp, Artificial Sequence
  Description of Artificial Sequence: Synthetic primer
cccaggactcacatgtgctt

SEQ ID NO: 630 - DNA, 20 bp, Artificial Sequence
  Description of Artificial Sequence: Synthetic primer
cccaggactcacatgtgctt

SEQ ID NO: 631 - DNA, 20 bp, Artificial Sequence
  Description of Artificial Sequence: Synthetic primer
atgtcacctctcctccacca

SEQ ID NO: 632 - DNA, 21 bp, Artificial Sequence
  Description of Artificial Sequence: Synthetic primer
ggccatccttgtatctctccc

SEQ ID NO: 633 - DNA, 20 bp, Artificial Sequence
  Description of Artificial Sequence: Synthetic primer
gcacggagatatccatgcct

SEQ ID NO: 634 - DNA, 21 bp, Artificial Sequence
  Description of Artificial Sequence: Synthetic primer
ggccatccttgtatctctccc

SEQ ID NO: 635 - DNA, 20 bp, Artificial Sequence
  Description of Artificial Sequence: Synthetic primer
tgtctccaccacttccctct

SEQ ID NO: 636 - DNA, 20 bp, Artificial Sequence
  Description of Artificial Sequence: Synthetic primer
gatccggcagcagtagatcc

SEQ ID NO: 637 - DNA, 20 bp, Artificial Sequence
  Description of Artificial Sequence: Synthetic primer
cccttgtcctctgtacagca

SEQ ID NO: 638 - DNA, 20 bp, Artificial Sequence
  Description of Artificial Sequence: Synthetic primer
tctcctttgcggaaatcccc

SEQ ID NO: 639 - DNA, 20 bp, Artificial Sequence
  Description of Artificial Sequence: Synthetic primer
gatccggcagcagtagatcc

SEQ ID NO: 640 - DNA, 20 bp, Artificial Sequence
  Description of Artificial Sequence: Synthetic primer
gatccggcagcagtagatcc

SEQ ID NO: 641 - DNA, 20 bp, Artificial Sequence
  Description of Artificial Sequence: Synthetic primer
gatccggcagcagtagatcc

SEQ ID NO: 642 - DNA, 20 bp, Artificial Sequence
  Description of Artificial Sequence: Synthetic primer
gatccggcagcagtagatcc

SEQ ID NO: 643 - DNA, 20 bp, Artificial Sequence
  Description of Artificial Sequence: Synthetic primer
gatccggcagcagtagatcc

SEQ ID NO: 644 - DNA, 20 bp, Artificial Sequence
  Description of Artificial Sequence: Synthetic primer
gcaaatgtccactcacctgg

SEQ ID NO: 645 - DNA, 20 bp, Artificial Sequence
  Description of Artificial Sequence: Synthetic primer
gcaaatgtccactcacctgg

SEQ ID NO: 646 - DNA, 20 bp, Artificial Sequence
  Description of Artificial Sequence: Synthetic primer
tcttagtggccctcctccag

SEQ ID NO: 647 - DNA, 20 bp, Artificial Sequence
  Description of Artificial Sequence: Synthetic primer
cccttgtcctctgtacagca

SEQ ID NO: 648 - DNA, 20 bp, Artificial Sequence
  Description of Artificial Sequence: Synthetic primer
tcttagtggccctcctccag

SEQ ID NO: 649 - DNA, 20 bp, Artificial Sequence
  Description of Artificial Sequence: Synthetic primer
tcttagtggccctcctccag

SEQ ID NO: 650 - DNA, 20 bp, Artificial Sequence
  Description of Artificial Sequence: Synthetic primer
actgagcatcaccaatgggg

SEQ ID NO: 651 - DNA, 20 bp, Artificial Sequence
  Description of Artificial Sequence: Synthetic primer
gtcccctggtggtaagcatc

SEQ ID NO: 652 - DNA, 20 bp, Artificial Sequence
  Description of Artificial Sequence: Synthetic primer
gtcccctggtggtaagcatc

SEQ ID NO: 653 - DNA, 20 bp, Artificial Sequence
  Description of Artificial Sequence: Synthetic primer
aaagattccctcctctgccc

SEQ ID NO: 654 - DNA, 21 bp, Artificial Sequence
  Description of Artificial Sequence: Synthetic primer
gccagctaaagattccctcct

SEQ ID NO: 655 - DNA, 20 bp, Artificial Sequence
  Description of Artificial Sequence: Synthetic primer
gcacggagatatccatgcct

SEQ ID NO: 656 - DNA, 20 bp, Artificial Sequence
  Description of Artificial Sequence: Synthetic primer
cccttgtcctctgtacagca

SEQ ID NO: 657 - DNA, 22 bp, Artificial Sequence
  Description of Artificial Sequence: Synthetic primer
tgagtacaacatagctcacaaa

SEQ ID NO: 658 - DNA, 22 bp, Artificial Sequence
  Description of Artificial Sequence: Synthetic primer
tgagtacaacatagctcacaaa

SEQ ID NO: 659 - DNA, 22 bp, Artificial Sequence
  Description of Artificial Sequence: Synthetic primer
caaggacaaggtgggcatgaag

SEQ ID NO: 660 - DNA, 20 bp, Artificial Sequence
  Description of Artificial Sequence: Synthetic primer
cacagatccctgctccgatg

SEQ ID NO: 661 - DNA, 20 bp, Artificial Sequence
  Description of Artificial Sequence: Synthetic primer
cacagatccctgctccgatg

SEQ ID NO: 662 - DNA, 20 bp, Artificial Sequence
  Description of Artificial Sequence: Synthetic primer
cgccgaagataagagccaga

SEQ ID NO: 663 - DNA, 22 bp, Artificial Sequence
  Description of Artificial Sequence: Synthetic primer
ggatttggatggacaaaagggt

SEQ ID NO: 664 - DNA, 22 bp, Artificial Sequence
  Description of Artificial Sequence: Synthetic primer
ggatttggatggacaaaagggt

SEQ ID NO: 665 - DNA, 20 bp, Artificial Sequence
  Description of Artificial Sequence: Synthetic primer
caaagccccaggacaggatt

SEQ ID NO: 666 - DNA, 20 bp, Artificial Sequence
  Description of Artificial Sequence: Synthetic primer
caaagccccaggacaggatt

SEQ ID NO: 667 - DNA, 20 bp, Artificial Sequence
  Description of Artificial Sequence: Synthetic primer
cccttgtcctctgtacagca

SEQ ID NO: 668 - DNA, 20 bp, Artificial Sequence
  Description of Artificial Sequence: Synthetic primer
caaagccccaggacaggatt

SEQ ID NO: 669 - DNA, 20 bp, Artificial Sequence
  Description of Artificial Sequence: Synthetic primer
caaagccccaggacaggatt

SEQ ID NO: 670 - DNA, 20 bp, Artificial Sequence
  Description of Artificial Sequence: Synthetic primer
caaagccccaggacaggatt

SEQ ID NO: 671 - DNA, 20 bp, Artificial Sequence
  Description of Artificial Sequence: Synthetic primer
cattgggctcctccacttca

SEQ ID NO: 672 - DNA, 20 bp, Artificial Sequence
  Description of Artificial Sequence: Synthetic primer
cattgggctcctccacttca

SEQ ID NO: 673 - DNA, 20 bp, Artificial Sequence
  Description of Artificial Sequence: Synthetic primer
cattgggctcctccacttca

SEQ ID NO: 674 - DNA, 20 bp, Artificial Sequence
  Description of Artificial Sequence: Synthetic primer
cattgcaaagcgacaaccca

SEQ ID NO: 675 - DNA, 20 bp, Artificial Sequence
  Description of Artificial Sequence: Synthetic primer
cattgcaaagcgacaaccca

SEQ ID NO: 676 - DNA, 20 bp, Artificial Sequence
  Description of Artificial Sequence: Synthetic primer
cattgcaaagcgacaaccca

SEQ ID NO: 677 - DNA, 20 bp, Artificial Sequence
  Description of Artificial Sequence: Synthetic primer
cattgcaaagcgacaaccca

SEQ ID NO: 678 - DNA, 20 bp, Artificial Sequence
  Description of Artificial Sequence: Synthetic primer
cagtgcaggtcccagttcaa

SEQ ID NO: 679 - DNA, 20 bp, Artificial Sequence
  Description of Artificial Sequence: Synthetic primer
cagtgcaggtcccagttcaa

SEQ ID NO: 680 - DNA, 20 bp, Artificial Sequence
  Description of Artificial Sequence: Synthetic primer
tcaaacacaggacaggctcc

SEQ ID NO: 681 - DNA, 20 bp, Artificial Sequence
  Description of Artificial Sequence: Synthetic primer
tctcctttgcggaaatcccc

SEQ ID NO: 682 - DNA, 20 bp, Artificial Sequence
  Description of Artificial Sequence: Synthetic primer
tctcctttgcggaaatcccc

SEQ ID NO: 683 - DNA, 20 bp, Artificial Sequence
  Description of Artificial Sequence: Synthetic primer
catctctcctccctcaccca

SEQ ID NO: 684 - DNA, 20 bp, Artificial Sequence
  Description of Artificial Sequence: Synthetic primer
ctagaagttccctgccgtcg

SEQ ID NO: 685 - DNA, 20 bp, Artificial Sequence
  Description of Artificial Sequence: Synthetic primer
ctagaagttccctgccgtcg

SEQ ID NO: 686 - DNA, 20 bp, Artificial Sequence
  Description of Artificial Sequence: Synthetic primer
gcccctctgaacatccatca

SEQ ID NO: 687 - DNA, 20 bp, Artificial Sequence
  Description of Artificial Sequence: Synthetic primer
gcccttcctccaactttcca

SEQ ID NO: 688 - DNA, 20 bp, Artificial Sequence
  Description of Artificial Sequence: Synthetic primer
ggcgaggctgacttacgtta

SEQ ID NO: 689 - DNA, 20 bp, Artificial Sequence
  Description of Artificial Sequence: Synthetic primer
ggtagcacagggaggagaga

SEQ ID NO: 690 - DNA, 20 bp, Artificial Sequence
  Description of Artificial Sequence: Synthetic primer
gcccttcctccaactttcca

SEQ ID NO: 691 - DNA, 20 bp, Artificial Sequence
  Description of Artificial Sequence: Synthetic primer
ctggttgtgggcagagaagt

SEQ ID NO: 692 - DNA, 20 bp, Artificial Sequence
  Description of Artificial Sequence: Synthetic primer
cgtgtctggaggaccaagag

SEQ ID NO: 693 - DNA, 20 bp, Artificial Sequence
  Description of Artificial Sequence: Synthetic primer
tggagccttgattgtgggag

SEQ ID NO: 694 - DNA, 20 bp, Artificial Sequence
  Description of Artificial Sequence: Synthetic primer
tggagccttgattgtgggag

SEQ ID NO: 695 - DNA, 20 bp, Artificial Sequence
  Description of Artificial Sequence: Synthetic primer
atcttgccccttgtcaggtg

SEQ ID NO: 696 - DNA, 20 bp, Artificial Sequence
  Description of Artificial Sequence: Synthetic primer
atcttgccccttgtcaggtg

SEQ ID NO: 697 - DNA, 20 bp, Artificial Sequence
  Description of Artificial Sequence: Synthetic primer
atcttgccccttgtcaggtg

SEQ ID NO: 698 - DNA, 20 bp, Artificial Sequence
  Description of Artificial Sequence: Synthetic primer
ttagttgccaaggagcggag

SEQ ID NO: 699 - DNA, 20 bp, Artificial Sequence
  Description of Artificial Sequence: Synthetic primer
gtctggcctttgagtggtga

SEQ ID NO: 700 - DNA, 20 bp, Artificial Sequence
  Description of Artificial Sequence: Synthetic primer
gtctggcctttgagtggtga

SEQ ID NO: 701 - DNA, 20 bp, Artificial Sequence
  Description of Artificial Sequence: Synthetic primer
gtctggcctttgagtggtga

SEQ ID NO: 702 - DNA, 20 bp, Artificial Sequence
  Description of Artificial Sequence: Synthetic primer
ataatctgggcgtctgcagg

SEQ ID NO: 703 - DNA, 20 bp, Artificial Sequence
  Description of Artificial Sequence: Synthetic primer
tgtgttgcagttcagcagga

SEQ ID NO: 704 - DNA, 20 bp, Artificial Sequence
  Description of Artificial Sequence: Synthetic primer
tggttgcagagtgagctgag

SEQ ID NO: 705 - DNA, 20 bp, Artificial Sequence
  Description of Artificial Sequence: Synthetic primer
tggttgcagagtgagctgag

SEQ ID NO: 706 - DNA, 20 bp, Artificial Sequence
  Description of Artificial Sequence: Synthetic primer
gcccctgcccctctttttat

SEQ ID NO: 707 - DNA, 20 bp, Artificial Sequence
  Description of Artificial Sequence: Synthetic primer
gcccctgcccctctttttat

SEQ ID NO: 708 - DNA, 20 bp, Artificial Sequence
  Description of Artificial Sequence: Synthetic primer
tggttgcagagtgagctgag

SEQ ID NO: 709 - DNA, 20 bp, Artificial Sequence
  Description of Artificial Sequence: Synthetic primer
gcccttcctccaactttcca

SEQ ID NO: 710 - DNA, 20 bp, Artificial Sequence
  Description of Artificial Sequence: Synthetic primer
ggccatgaaggagcatgagt

SEQ ID NO: 711 - DNA, 20 bp, Artificial Sequence
  Description of Artificial Sequence: Synthetic primer
tgaagacctgaacaccgctc

SEQ ID NO: 712 - DNA, 20 bp, Artificial Sequence
  Description of Artificial Sequence: Synthetic primer
aggtgactgaagtctgtgcg

SEQ ID NO: 713 - DNA, 20 bp, Artificial Sequence
  Description of Artificial Sequence: Synthetic primer
atcatgtaggttgccgcaca

SEQ ID NO: 714 - DNA, 21 bp, Artificial Sequence
  Description of Artificial Sequence: Synthetic primer
cctcctccatcttcatgctcc

SEQ ID NO: 715 - DNA, 21 bp, Artificial Sequence
  Description of Artificial Sequence: Synthetic primer
agtccttgattctgtgtgggt

SEQ ID NO: 716 - DNA, 20 bp, Artificial Sequence
  Description of Artificial Sequence: Synthetic primer
atcatgtaggttgccgcaca

SEQ ID NO: 717 - DNA, 20 bp, Artificial Sequence
  Description of Artificial Sequence: Synthetic primer
atcatgtaggttgccgcaca

SEQ ID NO: 718 - DNA, 20 bp, Artificial Sequence
  Description of Artificial Sequence: Synthetic primer
atcatgtaggttgccgcaca

SEQ ID NO: 719 - DNA, 20 bp, Artificial Sequence
  Description of Artificial Sequence: Synthetic primer
atcatgtaggttgccgcaca

SEQ ID NO: 720 - DNA, 20 bp, Artificial Sequence
  Description of Artificial Sequence: Synthetic primer
tgatttccactggaggtgcc

SEQ ID NO: 721 - DNA, 20 bp, Artificial Sequence
  Description of Artificial Sequence: Synthetic primer
tgatttccactggaggtgcc

SEQ ID NO: 722 - DNA, 20 bp, Artificial Sequence
  Description of Artificial Sequence: Synthetic primer
gagctccaccttgcagatgt

SEQ ID NO: 723 - DNA, 21 bp, Artificial Sequence
  Description of Artificial Sequence: Synthetic primer
cctcctccatcttcatgctcc

SEQ ID NO: 724 - DNA, 20 bp, Artificial Sequence
  Description of Artificial Sequence: Synthetic primer
aaatctgggttccgttgcct

SEQ ID NO: 725 - DNA, 20 bp, Artificial Sequence
  Description of Artificial Sequence: Synthetic primer
aaatctgggttccgttgcct

SEQ ID NO: 726 - DNA, 20 bp, Artificial Sequence
  Description of Artificial Sequence: Synthetic primer
aaatctgggttccgttgcct

SEQ ID NO: 727 - DNA, 20 bp, Artificial Sequence
  Description of Artificial Sequence: Synthetic primer
ggttgccacccacaataagc

SEQ ID NO: 728 - DNA, 20 bp, Artificial Sequence
  Description of Artificial Sequence: Synthetic primer
ggttgccacccacaataagc

SEQ ID NO: 729 - DNA, 20 bp, Artificial Sequence
  Description of Artificial Sequence: Synthetic primer
catcagcaccacactcacca

SEQ ID NO: 730 - DNA, 20 bp, Artificial Sequence
  Description of Artificial Sequence: Synthetic primer
catcagcaccacactcacca

SEQ ID NO: 731 - DNA, 20 bp, Artificial Sequence
  Description of Artificial Sequence: Synthetic primer
atccccatcagacatggtgc

SEQ ID NO: 732 - DNA, 22 bp, Artificial Sequence
  Description of Artificial Sequence: Synthetic primer
gcaccacactcaccattttgct

SEQ ID NO: 733 - DNA, 20 bp, Artificial Sequence
  Description of Artificial Sequence: Synthetic primer
atccccatcagacatggtgc

SEQ ID NO: 734 - DNA, 21 bp, Artificial Sequence
  Description of Artificial Sequence: Synthetic primer
cctcctccatcttcatgctcc

SEQ ID NO: 735 - DNA, 20 bp, Artificial Sequence
  Description of Artificial Sequence: Synthetic primer
atccccatcagacatggtgc

SEQ ID NO: 736 - DNA, 20 bp, Artificial Sequence
  Description of Artificial Sequence: Synthetic primer
atccccatcagacatggtgc

SEQ ID NO: 737 - DNA, 20 bp, Artificial Sequence
  Description of Artificial Sequence: Synthetic primer
atccccatcagacatggtgc

SEQ ID NO: 738 - DNA, 20 bp, Artificial Sequence
  Description of Artificial Sequence: Synthetic primer
atccccatcagacatggtgc

SEQ ID NO: 739 - DNA, 21 bp, Artificial Sequence
  Description of Artificial Sequence: Synthetic primer
tgcctcagctcttggaaattg

SEQ ID NO: 740 - DNA, 21 bp, Artificial Sequence
  Description of Artificial Sequence: Synthetic primer
tgcctcagctcttggaaattg

SEQ ID NO: 741 - DNA, 21 bp, Artificial Sequence
  Description of Artificial Sequence: Synthetic primer
tgcctcagctcttggaaattg

SEQ ID NO: 742 - DNA, 21 bp, Artificial Sequence
  Description of Artificial Sequence: Synthetic primer
agaattgcctcagctcttgga

SEQ ID NO: 743 - DNA, 21 bp, Artificial Sequence
  Description of Artificial Sequence: Synthetic primer
agaattgcctcagctcttgga

SEQ ID NO: 744 - DNA, 21 bp, Artificial Sequence
  Description of Artificial Sequence: Synthetic primer
agaattgcctcagctcttgga

SEQ ID NO: 745 - DNA, 20 bp, Artificial Sequence
  Description of Artificial Sequence: Synthetic primer
tgggttccgcatccaacttt

SEQ ID NO: 746 - DNA, 20 bp, Artificial Sequence
  Description of Artificial Sequence: Synthetic primer
tgggttccgcatccaacttt

SEQ ID NO: 747 - DNA, 20 bp, Artificial Sequence
  Description of Artificial Sequence: Synthetic primer
tcactgcctttgactgctga

SEQ ID NO: 748 - DNA, 20 bp, Artificial Sequence
  Description of Artificial Sequence: Synthetic primer
tcactgcctttgactgctga

SEQ ID NO: 749 - DNA, 20 bp, Artificial Sequence
  Description of Artificial Sequence: Synthetic primer
atcatgtaggttgccgcaca

SEQ ID NO: 750 - DNA, 20 bp, Artificial Sequence
  Description of Artificial Sequence: Synthetic primer
atcatgtaggttgccgcaca

SEQ ID NO: 751 - DNA, 19 bp, Artificial Sequence
  Description of Artificial Sequence: Synthetic primer
agggagtgacacctcaggg

SEQ ID NO: 752 - DNA, 20 bp, Artificial Sequence
  Description of Artificial Sequence: Synthetic primer
gtgtccagagagctccacac

SEQ ID NO: 753 - DNA, 20 bp, Artificial Sequence
  Description of Artificial Sequence: Synthetic primer
tttgggtcctggcattctgg

SEQ ID NO: 754 - DNA, 22 bp, Artificial Sequence
  Description of Artificial Sequence: Synthetic primer
tggcgtttgggtcctggcattc

SEQ ID NO: 755 - DNA, 20 bp, Artificial Sequence
  Description of Artificial Sequence: Synthetic primer
ccagccaaggtcctgagaaa

SEQ ID NO: 756 - DNA, 22 bp, Artificial Sequence
  Description of Artificial Sequence: Synthetic primer
ccagagaggctttcggggtgga

SEQ ID NO: 757 - DNA, 20 bp, Artificial Sequence
  Description of Artificial Sequence: Synthetic primer
ttccggaaccaatgcacaga

SEQ ID NO: 758 - DNA, 20 bp, Artificial Sequence
  Description of Artificial Sequence: Synthetic primer
cttggggcaggaagaggaag

SEQ ID NO: 759 - DNA, 20 bp, Artificial Sequence
  Description of Artificial Sequence: Synthetic primer
cttggggcaggaagaggaag

SEQ ID NO: 760 - DNA, 20 bp, Artificial Sequence
  Description of Artificial Sequence: Synthetic primer
ctgtaggtgaggatgcagcc

SEQ ID NO: 761 - DNA, 20 bp, Artificial Sequence
  Description of Artificial Sequence: Synthetic primer
ctgtaggtgaggatgcagcc

SEQ ID NO: 762 - DNA, 22 bp, Artificial Sequence
  Description of Artificial Sequence: Synthetic primer
gggggcaggaaggagttgtggt

SEQ ID NO: 763 - DNA, 22 bp, Artificial Sequence
  Description of Artificial Sequence: Synthetic primer
gggggcaggaaggagttgtggt

SEQ ID NO: 764 - DNA, 22 bp, Artificial Sequence
  Description of Artificial Sequence: Synthetic primer
gggggcaggaaggagttgtggt

SEQ ID NO: 765 - DNA, 20 bp, Artificial Sequence
  Description of Artificial Sequence: Synthetic primer
acccacagcaatgacgtagg

SEQ ID NO: 766 - DNA, 20 bp, Artificial Sequence
  Description of Artificial Sequence: Synthetic primer
cagtgaggaaagaccgggtc

SEQ ID NO: 767 - DNA, 22 bp, Artificial Sequence
  Description of Artificial Sequence: Synthetic primer
ccagagaggctttcggggtgga

SEQ ID NO: 768 - DNA, 20 bp, Artificial Sequence
  Description of Artificial Sequence: Synthetic primer
cagtgaggaaagaccgggtc

SEQ ID NO: 769 - DNA, 20 bp, Artificial Sequence
  Description of Artificial Sequence: Synthetic primer
cagtgaggaaagaccgggtc

SEQ ID NO: 770 - DNA, 22 bp, Artificial Sequence
  Description of Artificial Sequence: Synthetic primer
ctgggcctggctcacatcctct

SEQ ID NO: 771 - DNA, 22 bp, Artificial Sequence
  Description of Artificial Sequence: Synthetic primer
ctgggcctggctcacatcctct

SEQ ID NO: 772 - DNA, 20 bp, Artificial Sequence
  Description of Artificial Sequence: Synthetic primer
gagggcagctactcctttcc

SEQ ID NO: 773 - DNA, 20 bp, Artificial Sequence
  Description of Artificial Sequence: Synthetic primer
gagggcagctactcctttcc

SEQ ID NO: 774 - DNA, 20 bp, Artificial Sequence
  Description of Artificial Sequence: Synthetic primer
gagggcagctactcctttcc

SEQ ID NO: 775 - DNA, 20 bp, Artificial Sequence
  Description of Artificial Sequence: Synthetic primer
ctctggaacttgtgcccagt

SEQ ID NO: 776 - DNA, 20 bp, Artificial Sequence
  Description of Artificial Sequence: Synthetic primer
ctctggaacttgtgcccagt

SEQ ID NO: 777 - DNA, 20 bp, Artificial Sequence
  Description of Artificial Sequence: Synthetic primer
gtgtccagagagctccacac

SEQ ID NO: 778 - DNA, 22 bp, Artificial Sequence
  Description of Artificial Sequence: Synthetic primer
ccagagaggctttcggggtgga

SEQ ID NO: 779 - DNA, 20 bp, Artificial Sequence
  Description of Artificial Sequence: Synthetic primer
gtgtccagagagctccacac

SEQ ID NO: 780 - DNA, 20 bp, Artificial Sequence
  Description of Artificial Sequence: Synthetic primer
gtgtccagagagctccacac

SEQ ID NO: 781 - DNA, 20 bp, Artificial Sequence
  Description of Artificial Sequence: Synthetic primer
gtgtccagagagctccacac

SEQ ID NO: 782 - DNA, 20 bp, Artificial Sequence
  Description of Artificial Sequence: Synthetic primer
ccagccaaggtcctgagaaa

SEQ ID NO: 783 - DNA, 20 bp, Artificial Sequence
  Description of Artificial Sequence: Synthetic primer
ctgctccaagaagcctctcc

SEQ ID NO: 784 - DNA, 20 bp, Artificial Sequence
  Description of Artificial Sequence: Synthetic primer
ctgctccaagaagcctctcc

SEQ ID NO: 785 - DNA, 20 bp, Artificial Sequence
  Description of Artificial Sequence: Synthetic primer
tttgggtcctggcattctgg

SEQ ID NO: 786 - DNA, 20 bp, Artificial Sequence
  Description of Artificial Sequence: Synthetic primer
gcagaaggctgagatcctgg

SEQ ID NO: 787 - DNA, 20 bp, Artificial Sequence
  Description of Artificial Sequence: Synthetic primer
tttgggtcctggcattctgg

SEQ ID NO: 788 - DNA, 22 bp, Artificial Sequence
  Description of Artificial Sequence: Synthetic primer
tggcgtttgggtcctggcattc

SEQ ID NO: 789 - DNA, 20 bp, Artificial Sequence
  Description of Artificial Sequence: Synthetic primer
aagccagagatcaggtccct

SEQ ID NO: 790 - DNA, 20 bp, Artificial Sequence
  Description of Artificial Sequence: Synthetic primer
aagccagagatcaggtccct

SEQ ID NO: 791 - DNA, 20 bp, Artificial Sequence
  Description of Artificial Sequence: Synthetic primer
ggctccagtcaccaaaagga

SEQ ID NO: 792 - DNA, 20 bp, Artificial Sequence
  Description of Artificial Sequence: Synthetic primer
ggctccagtcaccaaaagga

SEQ ID NO: 793 - DNA, 22 bp, Artificial Sequence
  Description of Artificial Sequence: Synthetic primer
tgagggcaagttcagggtccca

SEQ ID NO: 794 - DNA, 22 bp, Artificial Sequence
  Description of Artificial Sequence: Synthetic primer
tgagggcaagttcagggtccca

SEQ ID NO: 795 - DNA, 22 bp, Artificial Sequence
  Description of Artificial Sequence: Synthetic primer
tgagggcaagttcagggtccca

SEQ ID NO: 796 - DNA, 20 bp, Artificial Sequence
  Description of Artificial Sequence: Synthetic primer
ggttgagtgctggattcgga

SEQ ID NO: 797 - DNA, 22 bp, Artificial Sequence
  Description of Artificial Sequence: Synthetic primer
tgagggcaagttcagggtccca

SEQ ID NO: 798 - DNA, 22 bp, Artificial Sequence
  Description of Artificial Sequence: Synthetic primer
tgagggcaagttcagggtccca

SEQ ID NO: 799 - DNA, 22 bp, Artificial Sequence
  Description of Artificial Sequence: Synthetic primer
tgagggcaagttcagggtccca

SEQ ID NO: 800 - DNA, 22 bp, Artificial Sequence
  Description of Artificial Sequence: Synthetic primer
tgagggcaagttcagggtccca

SEQ ID NO: 801 - DNA, 20 bp, Artificial Sequence
  Description of Artificial Sequence: Synthetic primer
gactgggctgctgagatctg

SEQ ID NO: 802 - DNA, 20 bp, Artificial Sequence
  Description of Artificial Sequence: Synthetic primer
gactgggctgctgagatctg

SEQ ID NO: 803 - DNA, 20 bp, Artificial Sequence
  Description of Artificial Sequence: Synthetic primer
gactgggctgctgagatctg

SEQ ID NO: 804 - DNA, 18 bp, Artificial Sequence
  Description of Artificial Sequence: Synthetic primer
cacgctcagcaccgtgta

SEQ ID NO: 805 - DNA, 19 bp, Artificial Sequence
  Description of Artificial Sequence: Synthetic primer
cacatactcgaggcctggc

SEQ ID NO: 806 - DNA, 20 bp, Artificial Sequence
  Description of Artificial Sequence: Synthetic primer
ttccggaaccaatgcacaga

SEQ ID NO: 807 - DNA, 20 bp, Artificial Sequence
  Description of Artificial Sequence: Synthetic primer
agcttgtccgtctggttgct

SEQ ID NO: 808 - DNA, 22 bp, Artificial Sequence
  Description of Artificial Sequence: Synthetic primer
aggaaggaaggcacagtggatc

SEQ ID NO: 809 - DNA, 22 bp, Artificial Sequence
  Description of Artificial Sequence: Synthetic primer
cgctaggaaagacaatggtggc

SEQ ID NO: 810 - DNA, 22 bp, Artificial Sequence
  Description of Artificial Sequence: Synthetic primer
ccaagagcagtgtccatcctca

SEQ ID NO: 811 - DNA, 21 bp, Artificial Sequence
  Description of Artificial Sequence: Synthetic primer
gaggtaggtgccgctgtcatt

SEQ ID NO: 812 - DNA, 22 bp, Artificial Sequence
  Description of Artificial Sequence: Synthetic primer
tacctaagaaccatcctggccg

SEQ ID NO: 813 - DNA, 21 bp, Artificial Sequence
  Description of Artificial Sequence: Synthetic primer
gaggtaggtgccgctgtcatt

SEQ ID NO: 814 - DNA, 21 bp, Artificial Sequence
  Description of Artificial Sequence: Synthetic primer
gaggtaggtgccgctgtcatt

SEQ ID NO: 815 - DNA, 21 bp, Artificial Sequence
  Description of Artificial Sequence: Synthetic primer
gaggtaggtgccgctgtcatt

SEQ ID NO: 816 - DNA, 21 bp, Artificial Sequence
  Description of Artificial Sequence: Synthetic primer
gaggtaggtgccgctgtcatt

SEQ ID NO: 817 - DNA, 19 bp, Artificial Sequence
  Description of Artificial Sequence: Synthetic primer
agctcctgatcctgtgcag

SEQ ID NO: 818 - DNA, 19 bp, Artificial Sequence
  Description of Artificial Sequence: Synthetic primer
agctcctgatcctgtgcag

SEQ ID NO: 819 - DNA, 19 bp, Artificial Sequence
  Description of Artificial Sequence: Synthetic primer
agctcctgatcctgtgcag

SEQ ID NO: 820 - DNA, 21 bp, Artificial Sequence
  Description of Artificial Sequence: Synthetic primer
gacccagactagcagcaccag

SEQ ID NO: 821 - DNA, 21 bp, Artificial Sequence
  Description of Artificial Sequence: Synthetic primer
gacccagactagcagcaccag

SEQ ID NO: 822 - DNA, 22 bp, Artificial Sequence
  Description of Artificial Sequence: Synthetic primer
tacctaagaaccatcctggccg

SEQ ID NO: 823 - DNA, 21 bp, Artificial Sequence
  Description of Artificial Sequence: Synthetic primer
gacccagactagcagcaccag

SEQ ID NO: 824 - DNA, 21 bp, Artificial Sequence
  Description of Artificial Sequence: Synthetic primer
gacccagactagcagcaccag

SEQ ID NO: 825 - DNA, 21 bp, Artificial Sequence
  Description of Artificial Sequence: Synthetic primer
gacccagactagcagcaccag

SEQ ID NO: 826 - DNA, 22 bp, Artificial Sequence
  Description of Artificial Sequence: Synthetic primer
ggtcttctctcgccactggaaa

SEQ ID NO: 827 - DNA, 22 bp, Artificial Sequence
  Description of Artificial Sequence: Synthetic primer
ggtcttctctcgccactggaaa

SEQ ID NO: 828 - DNA, 22 bp, Artificial Sequence
  Description of Artificial Sequence: Synthetic primer
cgctaggaaagacaatggtggc

SEQ ID NO: 829 - DNA, 22 bp, Artificial Sequence
  Description of Artificial Sequence: Synthetic primer
ccaagagcagtgtccatcctca

SEQ ID NO: 830 - DNA, 22 bp, Artificial Sequence
  Description of Artificial Sequence: Synthetic primer
tacctaagaaccatcctggccg

SEQ ID NO: 831 - DNA, 22 bp, Artificial Sequence
  Description of Artificial Sequence: Synthetic primer
ttctcctgaggaaatgcgctga

SEQ ID NO: 832 - DNA, 22 bp, Artificial Sequence
  Description of Artificial Sequence: Synthetic primer
tacctaagaaccatcctggccg

SEQ ID NO: 833 - DNA, 20 bp, Artificial Sequence
  Description of Artificial Sequence: Synthetic primer
agcttgtccgtctggttgct

SEQ ID NO: 834 - DNA, 20 bp, Artificial Sequence
  Description of Artificial Sequence: Synthetic primer
agcttgtccgtctggttgct

SEQ ID NO: 835 - DNA, 20 bp, Artificial Sequence
  Description of Artificial Sequence: Synthetic primer
agcttgtccgtctggttgct

SEQ ID NO: 836 - DNA, 20 bp, Artificial Sequence
  Description of Artificial Sequence: Synthetic primer
agcttgtccgtctggttgct

SEQ ID NO: 837 - DNA, 22 bp, Artificial Sequence
  Description of Artificial Sequence: Synthetic primer
ttcttgtacgagagagccagag

SEQ ID NO: 838 - DNA, 23 bp, Artificial Sequence
  Description of Artificial Sequence: Synthetic primer
cacccaaatatcactggtgtgga

SEQ ID NO: 839 - DNA, 21 bp, Artificial Sequence
  Description of Artificial Sequence: Synthetic primer
ggtaacatcttgccagaccca

SEQ ID NO: 840 - DNA, 23 bp, Artificial Sequence
  Description of Artificial Sequence: Synthetic primer
gaaatacgacgttggtggaggag

SEQ ID NO: 841 - DNA, 23 bp, Artificial Sequence
  Description of Artificial Sequence: Synthetic primer
tggtcagaaaacactgtgaaaag

SEQ ID NO: 842 - DNA, 22 bp, Artificial Sequence
  Description of Artificial Sequence: Synthetic primer
gatcagccccttaacacgactc

SEQ ID NO: 843 - DNA, 23 bp, Artificial Sequence
  Description of Artificial Sequence: Synthetic primer
gttgttgtggaaagtagtgctga

SEQ ID NO: 844 - DNA, 22 bp, Artificial Sequence
  Description of Artificial Sequence: Synthetic primer
aggtacagaggtgctaggaatc

SEQ ID NO: 845 - DNA, 23 bp, Artificial Sequence
  Description of Artificial Sequence: Synthetic primer
gaacaaaatctccagggtggctc

SEQ ID NO: 846 - DNA, 25 bp, Artificial Sequence
  Description of Artificial Sequence: Synthetic primer
cccttggaggaatgtgtctactttt

SEQ ID NO: 847 - DNA, 22 bp, Artificial Sequence
  Description of Artificial Sequence: Synthetic primer
gcgggtacttgaggtggatgat

SEQ ID NO: 848 - DNA, 20 bp, Artificial Sequence
  Description of Artificial Sequence: Synthetic primer
ggagccctcacctctcacta

SEQ ID NO: 849 - DNA, 20 bp, Artificial Sequence
  Description of Artificial Sequence: Synthetic primer
gagggtggagacctgtgaga

SEQ ID NO: 850 - DNA, 20 bp, Artificial Sequence
  Description of Artificial Sequence: Synthetic primer
tgaacttgtactgcgcctcc

SEQ ID NO: 851 - DNA, 20 bp, Artificial Sequence
  Description of Artificial Sequence: Synthetic primer
agaacaagtccagggaggga

SEQ ID NO: 852 - DNA, 20 bp, Artificial Sequence
  Description of Artificial Sequence: Synthetic primer
tacctgacggagagcgagaa

SEQ ID NO: 853 - DNA, 20 bp, Artificial Sequence
  Description of Artificial Sequence: Synthetic primer
actgagcacagaaagcacga

SEQ ID NO: 854 - DNA, 20 bp, Artificial Sequence
  Description of Artificial Sequence: Synthetic primer
ctgccttacctcgcacatga

SEQ ID NO: 855 - DNA, 20 bp, Artificial Sequence
  Description of Artificial Sequence: Synthetic primer
ctgccttacctcgcacatga

SEQ ID NO: 856 - DNA, 20 bp, Artificial Sequence
  Description of Artificial Sequence: Synthetic primer
ctgccttacctcgcacatga

SEQ ID NO: 857 - DNA, 20 bp, Artificial Sequence
  Description of Artificial Sequence: Synthetic primer
ctgccttacctcgcacatga

SEQ ID NO: 858 - DNA, 20 bp, Artificial Sequence
  Description of Artificial Sequence: Synthetic primer
ctgccttacctcgcacatga

SEQ ID NO: 859 - DNA, 20 bp, Artificial Sequence
  Description of Artificial Sequence: Synthetic primer
ctgccttacctcgcacatga

SEQ ID NO: 860 - DNA, 20 bp, Artificial Sequence
  Description of Artificial Sequence: Synthetic primer
ggtccccagccttgaattca

SEQ ID NO: 861 - DNA, 20 bp, Artificial Sequence
  Description of Artificial Sequence: Synthetic primer
ggtccccagccttgaattca

SEQ ID NO: 862 - DNA, 22 bp, Artificial Sequence
  Description of Artificial Sequence: Synthetic primer
gtagacaaaggcgcctgaggcc

SEQ ID NO: 863 - DNA, 20 bp, Artificial Sequence
  Description of Artificial Sequence: Synthetic primer
tacctgacggagagcgagaa

SEQ ID NO: 864 - DNA, 20 bp, Artificial Sequence
  Description of Artificial Sequence: Synthetic primer
gtagacaaaggcgcctgagg

SEQ ID NO: 865 - DNA, 20 bp, Artificial Sequence
  Description of Artificial Sequence: Synthetic primer
cagaagctcacatctggggg

SEQ ID NO: 866 - DNA, 20 bp, Artificial Sequence
  Description of Artificial Sequence: Synthetic primer
cagaagctcacatctggggg

SEQ ID NO: 867 - DNA, 19 bp, Artificial Sequence
  Description of Artificial Sequence: Synthetic primer
gcaaggaggggaaggtgtc

SEQ ID NO: 868 - DNA, 19 bp, Artificial Sequence
  Description of Artificial Sequence: Synthetic primer
gcaaggaggggaaggtgtc

SEQ ID NO: 869 - DNA, 20 bp, Artificial Sequence
  Description of Artificial Sequence: Synthetic primer
cggtatcctgggtgaatggg

SEQ ID NO: 870 - DNA, 20 bp, Artificial Sequence
  Description of Artificial Sequence: Synthetic primer
gagggtggagacctgtgaga

SEQ ID NO: 871 - DNA, 20 bp, Artificial Sequence
  Description of Artificial Sequence: Synthetic primer
gagggtggagacctgtgaga

SEQ ID NO: 872 - DNA, 20 bp, Artificial Sequence
  Description of Artificial Sequence: Synthetic primer
gagggtggagacctgtgaga

SEQ ID NO: 873 - DNA, 22 bp, Artificial Sequence
  Description of Artificial Sequence: Synthetic primer
cagcacaggccctgaaccactg

SEQ ID NO: 874 - DNA, 22 bp, Artificial Sequence
  Description of Artificial Sequence: Synthetic primer
acccggcctttctccacctctc

SEQ ID NO: 875 - DNA, 22 bp, Artificial Sequence
  Description of Artificial Sequence: Synthetic primer
tgccctggcatctgactgctct

SEQ ID NO: 876 - DNA, 22 bp, Artificial Sequence
  Description of Artificial Sequence: Synthetic primer
tgccctggcatctgactgctct

SEQ ID NO: 877 - DNA, 22 bp, Artificial Sequence
  Description of Artificial Sequence: Synthetic primer
tgccctggcatctgactgctct

SEQ ID NO: 878 - DNA, 20 bp, Artificial Sequence
  Description of Artificial Sequence: Synthetic primer
ttcggttgtgtcatgctccc

SEQ ID NO: 879 - DNA, 20 bp, Artificial Sequence
  Description of Artificial Sequence: Synthetic primer
ttcggttgtgtcatgctccc

SEQ ID NO: 880 - DNA, 20 bp, Artificial Sequence
  Description of Artificial Sequence: Synthetic primer
agaacaagtccagggaggga

SEQ ID NO: 881 - DNA, 20 bp, Artificial Sequence
  Description of Artificial Sequence: Synthetic primer
gccagatctcccgaatcagg

SEQ ID NO: 882 - DNA, 20 bp, Artificial Sequence
  Description of Artificial Sequence: Synthetic primer
gcacaagagagtggccaaaa

SEQ ID NO: 883 - DNA, 20 bp, Artificial Sequence
  Description of Artificial Sequence: Synthetic primer
atcatcctcacctgcagtgc

SEQ ID NO: 884 - DNA, 20 bp, Artificial Sequence
  Description of Artificial Sequence: Synthetic primer
aacagctcatggcacttagc

SEQ ID NO: 885 - DNA, 20 bp, Artificial Sequence
  Description of Artificial Sequence: Synthetic primer
aacagctcatggcacttagc

SEQ ID NO: 886 - DNA, 20 bp, Artificial Sequence
  Description of Artificial Sequence: Synthetic primer
aacagctcatggcacttagc

SEQ ID NO: 887 - DNA, 20 bp, Artificial Sequence
  Description of Artificial Sequence: Synthetic primer
tcaatgtcacagtccaggcc

SEQ ID NO: 888 - DNA, 20 bp, Artificial Sequence
  Description of Artificial Sequence: Synthetic primer
agagggacagtgggaaggtg

SEQ ID NO: 889 - DNA, 20 bp, Artificial Sequence
  Description of Artificial Sequence: Synthetic primer
agagggacagtgggaaggtg

SEQ ID NO: 890 - DNA, 20 bp, Artificial Sequence
  Description of Artificial Sequence: Synthetic primer
agagggacagtgggaaggtg

SEQ ID NO: 891 - DNA, 22 bp, Artificial Sequence
  Description of Artificial Sequence: Synthetic primer
gcgggtacttgaggtggatgat

SEQ ID NO: 892 - DNA, 20 bp, Artificial Sequence
  Description of Artificial Sequence: Synthetic primer
caggtcaggagacagcacag

SEQ ID NO: 893 - DNA, 20 bp, Artificial Sequence
  Description of Artificial Sequence: Synthetic primer
tgaccgctgcttcttcactt

SEQ ID NO: 894 - DNA, 20 bp, Artificial Sequence
  Description of Artificial Sequence: Synthetic primer
tgaccgctgcttcttcactt

SEQ ID NO: 895 - DNA, 20 bp, Artificial Sequence
  Description of Artificial Sequence: Synthetic primer
aagagctgtaccatggccac

SEQ ID NO: 896 - DNA, 20 bp, Artificial Sequence
  Description of Artificial Sequence: Synthetic primer
aagagctgtaccatggccac

SEQ ID NO: 897 - DNA, 20 bp, Artificial Sequence
  Description of Artificial Sequence: Synthetic primer
aagagctgtaccatggccac

SEQ ID NO: 898 - DNA, 19 bp, Artificial Sequence
  Description of Artificial Sequence: Synthetic primer
ggaggggatggagggtagg

SEQ ID NO: 899 - DNA, 20 bp, Artificial Sequence
  Description of Artificial Sequence: Synthetic primer
actgagcacagaaagcacga

SEQ ID NO: 900 - DNA, 20 bp, Artificial Sequence
  Description of Artificial Sequence: Synthetic primer
gtggcatgctcttggagtct

SEQ ID NO: 901 - DNA, 20 bp, Artificial Sequence
  Description of Artificial Sequence: Synthetic primer
ttctagtcaacgcgaccacc

SEQ ID NO: 902 - DNA, 20 bp, Artificial Sequence
  Description of Artificial Sequence: Synthetic primer
tctcccagtgtacgtcccat

SEQ ID NO: 903 - DNA, 20 bp, Artificial Sequence
  Description of Artificial Sequence: Synthetic primer
gaaggatggggagatgtgcc

SEQ ID NO: 904 - DNA, 20 bp, Artificial Sequence
  Description of Artificial Sequence: Synthetic primer
tctcccagtgtacgtcccat

SEQ ID NO: 905 - DNA, 20 bp, Artificial Sequence
  Description of Artificial Sequence: Synthetic primer
gtggcatgctcttggagtct

SEQ ID NO: 906 - DNA, 20 bp, Artificial Sequence
  Description of Artificial Sequence: Synthetic primer
tctcccagtgtacgtcccat

SEQ ID NO: 907 - DNA, 20 bp, Artificial Sequence
  Description of Artificial Sequence: Synthetic primer
tctcccagtgtacgtcccat

SEQ ID NO: 908 - DNA, 20 bp, Artificial Sequence
  Description of Artificial Sequence: Synthetic primer
tgctgtgcagtgtttcagga

SEQ ID NO: 909 - DNA, 20 bp, Artificial Sequence
  Description of Artificial Sequence: Synthetic primer
tgctgtgcagtgtttcagga

SEQ ID NO: 910 - DNA, 20 bp, Artificial Sequence
  Description of Artificial Sequence: Synthetic primer
tgctgtgcagtgtttcagga

SEQ ID NO: 911 - DNA, 20 bp, Artificial Sequence
  Description of Artificial Sequence: Synthetic primer
tgctgtgcagtgtttcagga

SEQ ID NO: 912 - DNA, 20 bp, Artificial Sequence
  Description of Artificial Sequence: Synthetic primer
gccggagccattacctttct

SEQ ID NO: 913 - DNA, 20 bp, Artificial Sequence
  Description of Artificial Sequence: Synthetic primer
tctgggtctctctctgggtg

SEQ ID NO: 914 - DNA, 20 bp, Artificial Sequence
  Description of Artificial Sequence: Synthetic primer
tctgggtctctctctgggtg

SEQ ID NO: 915 - DNA, 20 bp, Artificial Sequence
  Description of Artificial Sequence: Synthetic primer
ccattcctcctgtccagctg

SEQ ID NO: 916 - DNA, 20 bp, Artificial Sequence
  Description of Artificial Sequence: Synthetic primer
ccattcctcctgtccagctg

SEQ ID NO: 917 - DNA, 22 bp, Artificial Sequence
  Description of Artificial Sequence: Synthetic primer
catgcagctcggcacagtcctc

SEQ ID NO: 918 - DNA, 22 bp, Artificial Sequence
  Description of Artificial Sequence: Synthetic primer
catgcagctcggcacagtcctc

SEQ ID NO: 919 - DNA, 22 bp, Artificial Sequence
  Description of Artificial Sequence: Synthetic primer
catgcagctcggcacagtcctc

SEQ ID NO: 920 - DNA, 22 bp, Artificial Sequence
  Description of Artificial Sequence: Synthetic primer
catgcagctcggcacagtcctc

SEQ ID NO: 921 - DNA, 20 bp, Artificial Sequence
  Description of Artificial Sequence: Synthetic primer
tgcagttacccaggcttctg

SEQ ID NO: 922 - DNA, 20 bp, Artificial Sequence
  Description of Artificial Sequence: Synthetic primer
agaagatgcctctggttgct

SEQ ID NO: 923 - DNA, 20 bp, Artificial Sequence
  Description of Artificial Sequence: Synthetic primer
tggtggaggagaggtgacat

SEQ ID NO: 924 - DNA, 20 bp, Artificial Sequence
  Description of Artificial Sequence: Synthetic primer
cgcagcactgatggagagta

SEQ ID NO: 925 - DNA, 20 bp, Artificial Sequence
  Description of Artificial Sequence: Synthetic primer
cgcagcactgatggagagta

SEQ ID NO: 926 - DNA, 20 bp, Artificial Sequence
  Description of Artificial Sequence: Synthetic primer
tggtggaggagaggtgacat

SEQ ID NO: 927 - DNA, 20 bp, Artificial Sequence
  Description of Artificial Sequence: Synthetic primer
gaaggatggggagatgtgcc

SEQ ID NO: 928 - DNA, 20 bp, Artificial Sequence
  Description of Artificial Sequence: Synthetic primer
gaaggatggggagatgtgcc

SEQ ID NO: 929 - DNA, 20 bp, Artificial Sequence
  Description of Artificial Sequence: Synthetic primer
gaaggatggggagatgtgcc

SEQ ID NO: 930 - DNA, 20 bp, Artificial Sequence
  Description of Artificial Sequence: Synthetic primer
tctcccagtgtacgtcccat

SEQ ID NO: 931 - DNA, 20 bp, Artificial Sequence
  Description of Artificial Sequence: Synthetic primer
gcggctactgctcatgtgat

SEQ ID NO: 932 - DNA, 20 bp, Artificial Sequence
  Description of Artificial Sequence: Synthetic primer
gacattagccaaggtcaccc

SEQ ID NO: 933 - DNA, 20 bp, Artificial Sequence
  Description of Artificial Sequence: Synthetic primer
gcggctactgctcatgtgat

SEQ ID NO: 934 - DNA, 20 bp, Artificial Sequence
  Description of Artificial Sequence: Synthetic primer
acattagccaaggtcacccc

SEQ ID NO: 935 - DNA, 20 bp, Artificial Sequence
  Description of Artificial Sequence: Synthetic primer
atgcctatctgccctgcttc

SEQ ID NO: 936 - DNA, 20 bp, Artificial Sequence
  Description of Artificial Sequence: Synthetic primer
gcggctactgctcatgtgat

SEQ ID NO: 937 - DNA, 20 bp, Artificial Sequence
  Description of Artificial Sequence: Synthetic primer
atgcagggtcctcagaagtg

SEQ ID NO: 938 - DNA, 20 bp, Artificial Sequence
  Description of Artificial Sequence: Synthetic primer
atgcctatctgccctgcttc

SEQ ID NO: 939 - DNA, 20 bp, Artificial Sequence
  Description of Artificial Sequence: Synthetic primer
atgcctatctgccctgcttc

SEQ ID NO: 940 - DNA, 20 bp, Artificial Sequence
  Description of Artificial Sequence: Synthetic primer
atgcctatctgccctgcttc

SEQ ID NO: 941 - DNA, 20 bp, Artificial Sequence
  Description of Artificial Sequence: Synthetic primer
atgcctatctgccctgcttc

SEQ ID NO: 942 - DNA, 20 bp, Artificial Sequence
  Description of Artificial Sequence: Synthetic primer
atgcctatctgccctgcttc

SEQ ID NO: 943 - DNA, 20 bp, Artificial Sequence
  Description of Artificial Sequence: Synthetic primer
ggagcctgtcctgtgtttga

SEQ ID NO: 944 - DNA, 20 bp, Artificial Sequence
  Description of Artificial Sequence: Synthetic primer
ggagcctgtcctgtgtttga

SEQ ID NO: 945 - DNA, 20 bp, Artificial Sequence
  Description of Artificial Sequence: Synthetic primer
cgcaaaggagatgtgtccct

SEQ ID NO: 946 - DNA, 20 bp, Artificial Sequence
  Description of Artificial Sequence: Synthetic primer
gcggctactgctcatgtgat

SEQ ID NO: 947 - DNA, 20 bp, Artificial Sequence
  Description of Artificial Sequence: Synthetic primer
cgcaaaggagatgtgtccct

SEQ ID NO: 948 - DNA, 20 bp, Artificial Sequence
  Description of Artificial Sequence: Synthetic primer
cgcaaaggagatgtgtccct

SEQ ID NO: 949 - DNA, 20 bp, Artificial Sequence
  Description of Artificial Sequence: Synthetic primer
cagtgggatctactgctgcc

SEQ ID NO: 950 - DNA, 20 bp, Artificial Sequence
  Description of Artificial Sequence: Synthetic primer
acgtaggtatccaggcaggt

SEQ ID NO: 951 - DNA, 20 bp, Artificial Sequence
  Description of Artificial Sequence: Synthetic primer
acgtaggtatccaggcaggt

SEQ ID NO: 952 - DNA, 20 bp, Artificial Sequence
  Description of Artificial Sequence: Synthetic primer
aggtttggaagctgagggtg

SEQ ID NO: 953 - DNA, 20 bp, Artificial Sequence
  Description of Artificial Sequence: Synthetic primer
cttgctgcccctttgattcc

SEQ ID NO: 954 - DNA, 22 bp, Artificial Sequence
  Description of Artificial Sequence: Synthetic primer
tgtttctgacattagccaaggt

SEQ ID NO: 955 - DNA, 20 bp, Artificial Sequence
  Description of Artificial Sequence: Synthetic primer
gcggctactgctcatgtgat

SEQ ID NO: 956 - DNA, 25 bp, Artificial Sequence
  Description of Artificial Sequence: Synthetic primer
cggagtagaattcatttcaaatagg

SEQ ID NO: 957 - DNA, 25 bp, Artificial Sequence
  Description of Artificial Sequence: Synthetic primer
cggagtagaattcatttcaaatagg

SEQ ID NO: 958 - DNA, 24 bp, Artificial Sequence
  Description of Artificial Sequence: Synthetic primer
tcctctctctctctctctctctct

SEQ ID NO: 959 - DNA, 20 bp, Artificial Sequence
  Description of Artificial Sequence: Synthetic primer
aggactcagccatcctgtga

SEQ ID NO: 960 - DNA, 20 bp, Artificial Sequence
  Description of Artificial Sequence: Synthetic primer
aggactcagccatcctgtga

SEQ ID NO: 961 - DNA, 20 bp, Artificial Sequence
  Description of Artificial Sequence: Synthetic primer
cagccatcctgtgatgttgt

SEQ ID NO: 962 - DNA, 20 bp, Artificial Sequence
  Description of Artificial Sequence: Synthetic primer
tggccaatgacttacgggac

SEQ ID NO: 963 - DNA, 20 bp, Artificial Sequence
  Description of Artificial Sequence: Synthetic primer
tggccaatgacttacgggac

SEQ ID NO: 964 - DNA, 20 bp, Artificial Sequence
  Description of Artificial Sequence: Synthetic primer
gcgtgcttccagtgaaccta

SEQ ID NO: 965 - DNA, 20 bp, Artificial Sequence
  Description of Artificial Sequence: Synthetic primer
gcgtgcttccagtgaaccta

SEQ ID NO: 966 - DNA, 20 bp, Artificial Sequence
  Description of Artificial Sequence: Synthetic primer
gcggctactgctcatgtgat

SEQ ID NO: 967 - DNA, 20 bp, Artificial Sequence
  Description of Artificial Sequence: Synthetic primer
gcgtgcttccagtgaaccta

SEQ ID NO: 968 - DNA, 20 bp, Artificial Sequence
  Description of Artificial Sequence: Synthetic primer
gcgtgcttccagtgaaccta

SEQ ID NO: 969 - DNA, 20 bp, Artificial Sequence
  Description of Artificial Sequence: Synthetic primer
gcgtgcttccagtgaaccta

SEQ ID NO: 970 - DNA, 20 bp, Artificial Sequence
  Description of Artificial Sequence: Synthetic primer
gctgtctctttgggaaagcc

SEQ ID NO: 971 - DNA, 20 bp, Artificial Sequence
  Description of Artificial Sequence: Synthetic primer
gctgtctctttgggaaagcc

SEQ ID NO: 972 - DNA, 20 bp, Artificial Sequence
  Description of Artificial Sequence: Synthetic primer
gctgtctctttgggaaagcc

SEQ ID NO: 973 - DNA, 20 bp, Artificial Sequence
  Description of Artificial Sequence: Synthetic primer
ccgtgttacctgggaaatgc

SEQ ID NO: 974 - DNA, 20 bp, Artificial Sequence
  Description of Artificial Sequence: Synthetic primer
ccgtgttacctgggaaatgc

SEQ ID NO: 975 - DNA, 20 bp, Artificial Sequence
  Description of Artificial Sequence: Synthetic primer
ccgtgttacctgggaaatgc

SEQ ID NO: 976 - DNA, 20 bp, Artificial Sequence
  Description of Artificial Sequence: Synthetic primer
ccgtgttacctgggaaatgc

SEQ ID NO: 977 - DNA, 20 bp, Artificial Sequence
  Description of Artificial Sequence: Synthetic primer
agtggaggagcccaatgagt

SEQ ID NO: 978 - DNA, 20 bp, Artificial Sequence
  Description of Artificial Sequence: Synthetic primer
agtggaggagcccaatgagt

SEQ ID NO: 979 - DNA, 20 bp, Artificial Sequence
  Description of Artificial Sequence: Synthetic primer
aacaggactgcagcagtagc

SEQ ID NO: 980 - DNA, 20 bp, Artificial Sequence
  Description of Artificial Sequence: Synthetic primer
atgcagggtcctcagaagtg

SEQ ID NO: 981 - DNA, 20 bp, Artificial Sequence
  Description of Artificial Sequence: Synthetic primer
atgcagggtcctcagaagtg

SEQ ID NO: 982 - DNA, 20 bp, Artificial Sequence
  Description of Artificial Sequence: Synthetic primer
aagaggatggagaggtggct

SEQ ID NO: 983 - DNA, 21 bp, Artificial Sequence
  Description of Artificial Sequence: Synthetic oligonucleotide
aggatgtggtccccatgaact

SEQ ID NO: 984 - DNA, 21 bp, Artificial Sequence
  Description of Artificial Sequence: Synthetic oligonucleotide
ctcacgtcatccagcagagaa

SEQ ID NO: 985 - DNA, 21 bp, Artificial Sequence
  Description of Artificial Sequence: Synthetic oligonucleotide
ctcttcctcctactcaccatc

SEQ ID NO: 986 - DNA, 21 bp, Artificial Sequence
  Description of Artificial Sequence: Synthetic oligonucleotide
taggggccccaactccatggt

SEQ ID NO: 987 - DNA, 21 bp, Artificial Sequence
  Description of Artificial Sequence: Synthetic oligonucleotide
gtgttgctggtgagtgtgcat

SEQ ID NO: 988 - DNA, 21 bp, Artificial Sequence
  Description of Artificial Sequence: Synthetic oligonucleotide
tgagggtgaaggatagacgct

SEQ ID NO: 989 - DNA, 21 bp, Artificial Sequence
  Description of Artificial Sequence: Synthetic oligonucleotide
actttccattctctgctggat

SEQ ID NO: 990 - DNA, 21 bp, Artificial Sequence
  Description of Artificial Sequence: Synthetic oligonucleotide
tggcctggaggctatccagcg

SEQ ID NO: 991 - DNA, 21 bp, Artificial Sequence
  Description of Artificial Sequence: Synthetic oligonucleotide
tatctcttgtactacactgaa

SEQ ID NO: 992 - DNA, 21 bp, Artificial Sequence
  Description of Artificial Sequence: Synthetic oligonucleotide
tcagccagctctgaggggacc

SEQ ID NO: 993 - DNA, 21 bp, Artificial Sequence
  Description of Artificial Sequence: Synthetic oligonucleotide
ctcacaacagctgcagggaag

SEQ ID NO: 994 - DNA, 21 bp, Artificial Sequence
  Description of Artificial Sequence: Synthetic oligonucleotide
agcttgccattcagagaggca

SEQ ID NO: 995 - DNA, 21 bp, Artificial Sequence
  Description of Artificial Sequence: Synthetic oligonucleotide
tacatacctgtcactatacac

SEQ ID NO: 996 - DNA, 21 bp, Artificial Sequence
  Description of Artificial Sequence: Synthetic oligonucleotide
tttttctagatgtgaacatgg

SEQ ID NO: 997 - DNA, 21 bp, Artificial Sequence
  Description of Artificial Sequence: Synthetic oligonucleotide
atgattccatgttcacatcta

SEQ ID NO: 998 - DNA, 21 bp, Artificial Sequence
  Description of Artificial Sequence: Synthetic oligonucleotide
gtgtaacatacctggaggaca

SEQ ID NO: 999 - DNA, 21 bp, Artificial Sequence
  Description of Artificial Sequence: Synthetic oligonucleotide
ggaggattgctcaacaaccat

SEQ ID NO: 1000 - DNA, 21 bp, Artificial Sequence
  Description of Artificial Sequence: Synthetic oligonucleotide
taggaaacagtggcaataaat

SEQ ID NO: 1001 - DNA, 21 bp, Artificial Sequence
  Description of Artificial Sequence: Synthetic oligonucleotide
gcagacagggagaaataagga

SEQ ID NO: 1002 - DNA, 21 bp, Artificial Sequence
  Description of Artificial Sequence: Synthetic oligonucleotide
ccagctcactaagtcagtctc

SEQ ID NO: 1003 - DNA, 21 bp, Artificial Sequence
  Description of Artificial Sequence: Synthetic oligonucleotide
tatggagaagctctcatttct

SEQ ID NO: 1004 - DNA, 21 bp, Artificial Sequence
  Description of Artificial Sequence: Synthetic oligonucleotide
taagatgctatttcccgtata

SEQ ID NO: 1005 - DNA, 21 bp, Artificial Sequence
  Description of Artificial Sequence: Synthetic oligonucleotide
ccgtgtcattctctggactgc

SEQ ID NO: 1006 - DNA, 21 bp, Artificial Sequence
  Description of Artificial Sequence: Synthetic oligonucleotide
attcctccacttcaacacctg

SEQ ID NO: 1007 - DNA, 21 bp, Artificial Sequence
  Description of Artificial Sequence: Synthetic oligonucleotide
tacgggaaatagcatcttaga

SEQ ID NO: 1008 - DNA, 21 bp, Artificial Sequence
  Description of Artificial Sequence: Synthetic oligonucleotide
gtggcaatggataaggccgag

SEQ ID NO: 1009 - DNA, 21 bp, Artificial Sequence
  Description of Artificial Sequence: Synthetic oligonucleotide
cttgcttcaggaatggccagg

SEQ ID NO: 1010 - DNA, 21 bp, Artificial Sequence
  Description of Artificial Sequence: Synthetic oligonucleotide
tagttcaaaacctctatcaat

SEQ ID NO: 1011 - DNA, 21 bp, Artificial Sequence
  Description of Artificial Sequence: Synthetic oligonucleotide
tctgtgatatacacatcagaa

SEQ ID NO: 1012 - DNA, 21 bp, Artificial Sequence
  Description of Artificial Sequence: Synthetic oligonucleotide
ggcagacagggagaaataagg

SEQ ID NO: 1013 - DNA, 21 bp, Artificial Sequence
  Description of Artificial Sequence: Synthetic oligonucleotide
ctcgatataaggccttgagca

SEQ ID NO: 1014 - DNA, 21 bp, Artificial Sequence
  Description of Artificial Sequence: Synthetic oligonucleotide
gagtctctcagctggtacacg

SEQ ID NO: 1015 - DNA, 21 bp, Artificial Sequence
  Description of Artificial Sequence: Synthetic oligonucleotide
tggcagacagggagaaataag

SEQ ID NO: 1016 - DNA, 21 bp, Artificial Sequence
  Description of Artificial Sequence: Synthetic oligonucleotide
ccagctgacagatgggctccc

SEQ ID NO: 1017 - DNA, 21 bp, Artificial Sequence
  Description of Artificial Sequence: Synthetic oligonucleotide
ccgtataaagcatgagaccgt

SEQ ID NO: 1018 - DNA, 21 bp, Artificial Sequence
  Description of Artificial Sequence: Synthetic oligonucleotide
ccccaacccaggctggagtcc

SEQ ID NO: 1019 - DNA, 21 bp, Artificial Sequence
  Description of Artificial Sequence: Synthetic oligonucleotide
ttggcagacagggagaaataa

SEQ ID NO: 1020 - DNA, 21 bp, Artificial Sequence
  Description of Artificial Sequence: Synthetic oligonucleotide
tcagaagagcctggctaggaa

SEQ ID NO: 1021 - DNA, 21 bp, Artificial Sequence
  Description of Artificial Sequence: Synthetic oligonucleotide
ctctgccagagttatattgct

SEQ ID NO: 1022 - DNA, 21 bp, Artificial Sequence
  Description of Artificial Sequence: Synthetic oligonucleotide
ccatgcctgcctttactctgc

SEQ ID NO: 1023 - DNA, 21 bp, Artificial Sequence
  Description of Artificial Sequence: Synthetic oligonucleotide
gtctgtgatatacacatcaga

SEQ ID NO: 1024 - DNA, 21 bp, Artificial Sequence
  Description of Artificial Sequence: Synthetic oligonucleotide
cggatcttcctggcggcgcga

SEQ ID NO: 1025 - DNA, 21 bp, Artificial Sequence
  Description of Artificial Sequence: Synthetic oligonucleotide
aaggcagctggcaccagtgcc

SEQ ID NO: 1026 - DNA, 21 bp, Artificial Sequence
  Description of Artificial Sequence: Synthetic oligonucleotide
tggtgtcactggcggcggccg

SEQ ID NO: 1027 - DNA, 21 bp, Artificial Sequence
  Description of Artificial Sequence: Synthetic oligonucleotide
ttctgccccgactgcagccac

SEQ ID NO: 1028 - DNA, 21 bp, Artificial Sequence
  Description of Artificial Sequence: Synthetic oligonucleotide
gtgaccggcacgagggctaag

SEQ ID NO: 1029 - DNA, 21 bp, Artificial Sequence
  Description of Artificial Sequence: Synthetic oligonucleotide
ccatcggcctgactcccatgc

SEQ ID NO: 1030 - DNA, 21 bp, Artificial Sequence
  Description of Artificial Sequence: Synthetic oligonucleotide
ccatcaccatcagcaccgggt

SEQ ID NO: 1031 - DNA, 21 bp, Artificial Sequence
  Description of Artificial Sequence: Synthetic oligonucleotide
tcacagcccaagatagttaag

SEQ ID NO: 1032 - DNA, 21 bp, Artificial Sequence
  Description of Artificial Sequence: Synthetic oligonucleotide
ctgaattgctatgtgtctggg

SEQ ID NO: 1033 - DNA, 21 bp, Artificial Sequence
  Description of Artificial Sequence: Synthetic oligonucleotide
ctgaagaatggagagagaatt

SEQ ID NO: 1034 - DNA, 21 bp, Artificial Sequence
  Description of Artificial Sequence: Synthetic oligonucleotide
tcagtgggggtgaattcagtg

SEQ ID NO: 1035 - DNA, 21 bp, Artificial Sequence
  Description of Artificial Sequence: Synthetic oligonucleotide
cattctctgctggatgacgtg

SEQ ID NO: 1036 - DNA, 21 bp, Artificial Sequence
  Description of Artificial Sequence: Synthetic oligonucleotide
atccatccgacattgaagttg

SEQ ID NO: 1037 - DNA, 21 bp, Artificial Sequence
  Description of Artificial Sequence: Synthetic oligonucleotide
ccccacttaactatcttgggc

SEQ ID NO: 1038 - DNA, 21 bp, Artificial Sequence
  Description of Artificial Sequence: Synthetic oligonucleotide
gctgtgctcgcgctactctct

SEQ ID NO: 1039 - DNA, 21 bp, Artificial Sequence
  Description of Artificial Sequence: Synthetic oligonucleotide
gctggtgtcgttttgtcctga

SEQ ID NO: 1040 - DNA, 21 bp, Artificial Sequence
  Description of Artificial Sequence: Synthetic oligonucleotide
tgctggcatctccatactctc

SEQ ID NO: 1041 - DNA, 21 bp, Artificial Sequence
  Description of Artificial Sequence: Synthetic oligonucleotide
gtctcttgcagtgcctttctc

SEQ ID NO: 1042 - DNA, 21 bp, Artificial Sequence
  Description of Artificial Sequence: Synthetic oligonucleotide
aggatattcacaaatgttgac

SEQ ID NO: 1043 - DNA, 21 bp, Artificial Sequence
  Description of Artificial Sequence: Synthetic oligonucleotide
gaaggtaaaagaccatcgttc

SEQ ID NO: 1044 - DNA, 21 bp, Artificial Sequence
  Description of Artificial Sequence: Synthetic oligonucleotide
tcatacatcatctgaagaaca

SEQ ID NO: 1045 - DNA, 21 bp, Artificial Sequence
  Description of Artificial Sequence: Synthetic oligonucleotide
atctttcctcacaacagctgc

SEQ ID NO: 1046 - DNA, 21 bp, Artificial Sequence
  Description of Artificial Sequence: Synthetic oligonucleotide
agtgaagagaaaggaagtaca

SEQ ID NO: 1047 - DNA, 21 bp, Artificial Sequence
  Description of Artificial Sequence: Synthetic oligonucleotide
tttgttctttcagtgaagaga

SEQ ID NO: 1048 - DNA, 21 bp, Artificial Sequence
  Description of Artificial Sequence: Synthetic oligonucleotide
ctaggcttagaagtggaaata

SEQ ID NO: 1049 - DNA, 21 bp, Artificial Sequence
  Description of Artificial Sequence: Synthetic oligonucleotide
gaaggcctgcatcatgatggc

SEQ ID NO: 1050 - DNA, 21 bp, Artificial Sequence
  Description of Artificial Sequence: Synthetic oligonucleotide
gtgcaagggtcacagtgttca

SEQ ID NO: 1051 - DNA, 21 bp, Artificial Sequence
  Description of Artificial Sequence: Synthetic oligonucleotide
ggacgataatctagcaacaga

SEQ ID NO: 1052 - DNA, 21 bp, Artificial Sequence
  Description of Artificial Sequence: Synthetic oligonucleotide
ttccttgggcaggtgaaagga

SEQ ID NO: 1053 - DNA, 21 bp, Artificial Sequence
  Description of Artificial Sequence: Synthetic oligonucleotide
gtttacatctgcacttggtat

SEQ ID NO: 1054 - DNA, 21 bp, Artificial Sequence
  Description of Artificial Sequence: Synthetic oligonucleotide
cttggtgcaagggtcacagtg

SEQ ID NO: 1055 - DNA, 21 bp, Artificial Sequence
  Description of Artificial Sequence: Synthetic oligonucleotide
ctgttctgctgtgtcttggac

SEQ ID NO: 1056 - DNA, 21 bp, Artificial Sequence
  Description of Artificial Sequence: Synthetic oligonucleotide
ctctttgcacttggtgttgct

SEQ ID NO: 1057 - DNA, 21 bp, Artificial Sequence
  Description of Artificial Sequence: Synthetic oligonucleotide
tgttctgctgtgtcttggaca

SEQ ID NO: 1058 - DNA, 21 bp, Artificial Sequence
  Description of Artificial Sequence: Synthetic oligonucleotide
acaggttcttacgtctgttgc

SEQ ID NO: 1059 - DNA, 21 bp, Artificial Sequence
  Description of Artificial Sequence: Synthetic oligonucleotide
ggcaggtgaaaggaaagctag

SEQ ID NO: 1060 - DNA, 21 bp, Artificial Sequence
  Description of Artificial Sequence: Synthetic oligonucleotide
ctaagaaacagtgagccttgt

SEQ ID NO: 1061 - DNA, 21 bp, Artificial Sequence
  Description of Artificial Sequence: Synthetic oligonucleotide
cctctttgccccaacccaggc

SEQ ID NO: 1062 - DNA, 21 bp, Artificial Sequence
  Description of Artificial Sequence: Synthetic oligonucleotide
aggtttccttgagtggcaggc

SEQ ID NO: 1063 - DNA, 21 bp, Artificial Sequence
  Description of Artificial Sequence: Synthetic oligonucleotide
agaatcaaaatcggtgaatag

SEQ ID NO: 1064 - DNA, 21 bp, Artificial Sequence
  Description of Artificial Sequence: Synthetic oligonucleotide
ccccttactgctcttctaggc

SEQ ID NO: 1065 - DNA, 21 bp, Artificial Sequence
  Description of Artificial Sequence: Synthetic oligonucleotide
ggtggcaatggataaggccga

SEQ ID NO: 1066 - DNA, 21 bp, Artificial Sequence
  Description of Artificial Sequence: Synthetic oligonucleotide
gaactataaatcagaacacct

SEQ ID NO: 1067 - DNA, 21 bp, Artificial Sequence
  Description of Artificial Sequence: Synthetic oligonucleotide
tttctcagaagagcctggcta

SEQ ID NO: 1068 - DNA, 21 bp, Artificial Sequence
  Description of Artificial Sequence: Synthetic oligonucleotide
cccgtgtcattctctggactg

SEQ ID NO: 1069 - DNA, 21 bp, Artificial Sequence
  Description of Artificial Sequence: Synthetic oligonucleotide
ctgggcctttttcccatgcct

SEQ ID NO: 1070 - DNA, 21 bp, Artificial Sequence
  Description of Artificial Sequence: Synthetic oligonucleotide
aactataaatcagaacacctg

SEQ ID NO: 1071 - DNA, 21 bp, Artificial Sequence
  Description of Artificial Sequence: Synthetic oligonucleotide
attctcaaacaaatgtgtcac

SEQ ID NO: 1072 - DNA, 21 bp, Artificial Sequence
  Description of Artificial Sequence: Synthetic oligonucleotide
cttgagtggcaggccaggcct

SEQ ID NO: 1073 - DNA, 21 bp, Artificial Sequence
  Description of Artificial Sequence: Synthetic oligonucleotide
catgtgcaaacgccttcaaca

SEQ ID NO: 1074 - DNA, 21 bp, Artificial Sequence
  Description of Artificial Sequence: Synthetic oligonucleotide
tactaagaaacagtgagcctt

SEQ ID NO: 1075 - DNA, 21 bp, Artificial Sequence
  Description of Artificial Sequence: Synthetic oligonucleotide
ctcagactgtttgccccttac

SEQ ID NO: 1076 - DNA, 21 bp, Artificial Sequence
  Description of Artificial Sequence: Synthetic oligonucleotide
taattcctccacttcaacacc

SEQ ID NO: 1077 - DNA, 21 bp, Artificial Sequence
  Description of Artificial Sequence: Synthetic oligonucleotide
ataggatcttcttcaaaaccc

SEQ ID NO: 1078 - DNA, 21 bp, Artificial Sequence
  Description of Artificial Sequence: Synthetic oligonucleotide
gaagaagatcctattaaataa

SEQ ID NO: 1079 - DNA, 21 bp, Artificial Sequence
  Description of Artificial Sequence: Synthetic oligonucleotide
tgtttttaatgtgactctcat

SEQ ID NO: 1080 - DNA, 21 bp, Artificial Sequence
  Description of Artificial Sequence: Synthetic oligonucleotide
gtactttacagtttattaaat

SEQ ID NO: 1081 - DNA, 21 bp, Artificial Sequence
  Description of Artificial Sequence: Synthetic oligonucleotide
ataaactgtaaagtaccaaac

SEQ ID NO: 1082 - DNA, 21 bp, Artificial Sequence
  Description of Artificial Sequence: Synthetic oligonucleotide
gacttttcccagctgacagat

SEQ ID NO: 1083 - DNA, 21 bp, Artificial Sequence
  Description of Artificial Sequence: Synthetic oligonucleotide
cccagctgacagatgggctcc

SEQ ID NO: 1084 - DNA, 21 bp, Artificial Sequence
  Description of Artificial Sequence: Synthetic oligonucleotide
gtggtgtcactggcggcggcc

SEQ ID NO: 1085 - DNA, 21 bp, Artificial Sequence
  Description of Artificial Sequence: Synthetic oligonucleotide
gccatcaccatcagcaccggg

SEQ ID NO: 1086 - DNA, 21 bp, Artificial Sequence
  Description of Artificial Sequence: Synthetic oligonucleotide
gtcctggtcctcacgcagagc

SEQ ID NO: 1087 - DNA, 21 bp, Artificial Sequence
  Description of Artificial Sequence: Synthetic oligonucleotide
gccctcgtgccggtcaccaag

SEQ ID NO: 1088 - DNA, 21 bp, Artificial Sequence
  Description of Artificial Sequence: Synthetic oligonucleotide
gctgaccgcagttgttccaac

SEQ ID NO: 1089 - DNA, 21 bp, Artificial Sequence
  Description of Artificial Sequence: Synthetic oligonucleotide
ggctgaccgcagttgttccaa

SEQ ID NO: 1090 - DNA, 21 bp, Artificial Sequence
  Description of Artificial Sequence: Synthetic oligonucleotide
gccctccccgcagccctggga

SEQ ID NO: 1091 - DNA, 21 bp, Artificial Sequence
  Description of Artificial Sequence: Synthetic oligonucleotide
aacttctttgcctgtgtgctg

SEQ ID NO: 1092 - DNA, 21 bp, Artificial Sequence
  Description of Artificial Sequence: Synthetic oligonucleotide
tttgcctgtgtgctggtgccc

SEQ ID NO: 1093 - DNA, 21 bp, Artificial Sequence
  Description of Artificial Sequence: Synthetic oligonucleotide
cctgtgtgctggtgcccctgc

SEQ ID NO: 1094 - DNA, 21 bp, Artificial Sequence
  Description of Artificial Sequence: Synthetic oligonucleotide
agctgtcgtcgcgccgccagg

SEQ ID NO: 1095 - DNA, 21 bp, Artificial Sequence
  Description of Artificial Sequence: Synthetic oligonucleotide
tgcagtgtggaccgtgcccgc

SEQ ID NO: 1096 - DNA, 21 bp, Artificial Sequence
  Description of Artificial Sequence: Synthetic oligonucleotide
gcagcatggacctccttctgc

SEQ ID NO: 1097 - DNA, 21 bp, Artificial Sequence
  Description of Artificial Sequence: Synthetic oligonucleotide
ccctctgctggctgcccctac

SEQ ID NO: 1098 - DNA, 21 bp, Artificial Sequence
  Description of Artificial Sequence: Synthetic oligonucleotide
actttcttctgccccgactgc

SEQ ID NO: 1099 - DNA, 21 bp, Artificial Sequence
  Description of Artificial Sequence: Synthetic oligonucleotide
cttctgccccgactgcagcca

SEQ ID NO: 1100 - DNA, 21 bp, Artificial Sequence
  Description of Artificial Sequence: Synthetic oligonucleotide
atctacgcctaccgtatccgc

SEQ ID NO: 1101 - DNA, 21 bp, Artificial Sequence
  Description of Artificial Sequence: Synthetic oligonucleotide
cgcaagatcattcgcagccac

SEQ ID NO: 1102 - DNA, 21 bp, Artificial Sequence
  Description of Artificial Sequence: Synthetic oligonucleotide
aaaggttcttgctgcctcagg

SEQ ID NO: 1103 - DNA, 21 bp, Artificial Sequence
  Description of Artificial Sequence: Synthetic oligonucleotide
caaggcagctggcaccagtgc

SEQ ID NO: 1104 - DNA, 21 bp, Artificial Sequence
  Description of Artificial Sequence: Synthetic oligonucleotide
agctcatggctaaggagctcc

SEQ ID NO: 1105 - DNA, 21 bp, Artificial Sequence
  Description of Artificial Sequence: Synthetic oligonucleotide
gccatgagctcaagggagtgt

SEQ ID NO: 1106 - DNA, 21 bp, Artificial Sequence
  Description of Artificial Sequence: Synthetic oligonucleotide
cccgatattcctcaggtactc

SEQ ID NO: 1107 - DNA, 21 bp, Artificial Sequence
  Description of Artificial Sequence: Synthetic oligonucleotide
ccattctctgctggatgacgt

SEQ ID NO: 1108 - DNA, 21 bp, Artificial Sequence
  Description of Artificial Sequence: Synthetic oligonucleotide
aatgtcggatggatgaaaccc

SEQ ID NO: 1109 - DNA, 21 bp, Artificial Sequence
  Description of Artificial Sequence: Synthetic oligonucleotide
tcaattctctctccattcttc

SEQ ID NO: 1110 - DNA, 21 bp, Artificial Sequence
  Description of Artificial Sequence: Synthetic oligonucleotide
ttcaattctctctccattctt

SEQ ID NO: 1111 - DNA, 21 bp, Artificial Sequence
  Description of Artificial Sequence: Synthetic oligonucleotide
ctgaaagacaagtctgaatgc

SEQ ID NO: 1112 - DNA, 21 bp, Artificial Sequence
  Description of Artificial Sequence: Synthetic oligonucleotide
tctttcagcaaggactggtct

SEQ ID NO: 1113 - DNA, 21 bp, Artificial Sequence
  Description of Artificial Sequence: Synthetic oligonucleotide
agcaaggactggtctttctat

SEQ ID NO: 1114 - DNA, 21 bp, Artificial Sequence
  Description of Artificial Sequence: Synthetic oligonucleotide
actatcttgggctgtgacaaa

SEQ ID NO: 1115 - DNA, 21 bp, Artificial Sequence
  Description of Artificial Sequence: Synthetic oligonucleotide
gtcacagcccaagatagttaa

SEQ ID NO: 1116 - DNA, 21 bp, Artificial Sequence
  Description of Artificial Sequence: Synthetic oligonucleotide
tcctcctacagatacaaactg

SEQ ID NO: 1117 - DNA, 21 bp, Artificial Sequence
  Description of Artificial Sequence: Synthetic oligonucleotide
gtcctgagagtccagtttgta

SEQ ID NO: 1118 - DNA, 21 bp, Artificial Sequence
  Description of Artificial Sequence: Synthetic oligonucleotide
tgttgctggatgctgaggggc

SEQ ID NO: 1119 - DNA, 21 bp, Artificial Sequence
  Description of Artificial Sequence: Synthetic oligonucleotide
ccttttcttcgtggccaatgc

SEQ ID NO: 1120 - DNA, 21 bp, Artificial Sequence
  Description of Artificial Sequence: Synthetic oligonucleotide
tcttcgtggccaatgccataa

SEQ ID NO: 1121 - DNA, 21 bp, Artificial Sequence
  Description of Artificial Sequence: Synthetic oligonucleotide
cttcgtggccaatgccataat

SEQ ID NO: 1122 - DNA, 21 bp, Artificial Sequence
  Description of Artificial Sequence: Synthetic oligonucleotide
gggctctgacaggtaggaccc

SEQ ID NO: 1123 - DNA, 21 bp, Artificial Sequence
  Description of Artificial Sequence: Synthetic oligonucleotide
taccttggggctctgacaggt

SEQ ID NO: 1124 - DNA, 21 bp, Artificial Sequence
  Description of Artificial Sequence: Synthetic oligonucleotide
ttaccttggggctctgacagg

SEQ ID NO: 1125 - DNA, 21 bp, Artificial Sequence
  Description of Artificial Sequence: Synthetic oligonucleotide
ttaacagcgatgctgaccccc

SEQ ID NO: 1126 - DNA, 21 bp, Artificial Sequence
  Description of Artificial Sequence: Synthetic oligonucleotide
tatgaccagatggacctggct

SEQ ID NO: 1127 - DNA, 21 bp, Artificial Sequence
  Description of Artificial Sequence: Synthetic oligonucleotide
tcctcccagaacccgacacag

SEQ ID NO: 1128 - DNA, 21 bp, Artificial Sequence
  Description of Artificial Sequence: Synthetic oligonucleotide
cctcccagaacccgacacaga

SEQ ID NO: 1129 - DNA, 21 bp, Artificial Sequence
  Description of Artificial Sequence: Synthetic oligonucleotide
catgtcacacaacagcctgct

SEQ ID NO: 1130 - DNA, 21 bp, Artificial Sequence
  Description of Artificial Sequence: Synthetic oligonucleotide
ctcaccgatattggcataagc

SEQ ID NO: 1131 - DNA, 21 bp, Artificial Sequence
  Description of Artificial Sequence: Synthetic oligonucleotide
tccttgtctgggcagcggaac

SEQ ID NO: 1132 - DNA, 21 bp, Artificial Sequence
  Description of Artificial Sequence: Synthetic oligonucleotide
ccttgtctgggcagcggaact

SEQ ID NO: 1133 - DNA, 21 bp, Artificial Sequence
  Description of Artificial Sequence: Synthetic oligonucleotide
tctgggcagcggaactggacc

SEQ ID NO: 1134 - DNA, 21 bp, Artificial Sequence
  Description of Artificial Sequence: Synthetic oligonucleotide
ctcaggccctccagctgggag

SEQ ID NO: 1135 - DNA, 21 bp, Artificial Sequence
  Description of Artificial Sequence: Synthetic oligonucleotide
ctgaaaatgtccttgctcagg

SEQ ID NO: 1136 - DNA, 21 bp, Artificial Sequence
  Description of Artificial Sequence: Synthetic oligonucleotide
tctcaaagtagagcacatagg

SEQ ID NO: 1137 - DNA, 21 bp, Artificial Sequence
  Description of Artificial Sequence: Synthetic oligonucleotide
atctggtcctatgtgctctac

SEQ ID NO: 1138 - DNA, 21 bp, Artificial Sequence
  Description of Artificial Sequence: Synthetic oligonucleotide
ctgcccaacttctgctggcat

SEQ ID NO: 1139 - DNA, 21 bp, Artificial Sequence
  Description of Artificial Sequence: Synthetic oligonucleotide
tctgcccaacttctgctggca

SEQ ID NO: 1140 - DNA, 21 bp, Artificial Sequence
  Description of Artificial Sequence: Synthetic oligonucleotide
ctgacttttctgcccaacttc

SEQ ID NO: 1141 - DNA, 21 bp, Artificial Sequence
  Description of Artificial Sequence: Synthetic oligonucleotide
ctctgcagccttcccagagga

SEQ ID NO: 1142 - DNA, 21 bp, Artificial Sequence
  Description of Artificial Sequence: Synthetic oligonucleotide
ccagaggagcttccggcagac

SEQ ID NO: 1143 - DNA, 21 bp, Artificial Sequence
  Description of Artificial Sequence: Synthetic oligonucleotide
aggtctgccggaagctcctct

SEQ ID NO: 1144 - DNA, 21 bp, Artificial Sequence
  Description of Artificial Sequence: Synthetic oligonucleotide
cagtgcttcaggtctgccgga

SEQ ID NO: 1145 - DNA, 21 bp, Artificial Sequence
  Description of Artificial Sequence: Synthetic oligonucleotide
cggcagacctgaagcactgga

SEQ ID NO: 1146 - DNA, 21 bp, Artificial Sequence
  Description of Artificial Sequence: Synthetic oligonucleotide
ctcacagctgagccccccact

SEQ ID NO: 1147 - DNA, 21 bp, Artificial Sequence
  Description of Artificial Sequence: Synthetic oligonucleotide
ctccaggcgcatctggccgga

SEQ ID NO: 1148 - DNA, 21 bp, Artificial Sequence
  Description of Artificial Sequence: Synthetic oligonucleotide
tctcttgcagtgcctttctcc

SEQ ID NO: 1149 - DNA, 21 bp, Artificial Sequence
  Description of Artificial Sequence: Synthetic oligonucleotide
ctccagttcctcgttgagctg

SEQ ID NO: 1150 - DNA, 21 bp, Artificial Sequence
  Description of Artificial Sequence: Synthetic oligonucleotide
tcttgggcggggtggccattc

SEQ ID NO: 1151 - DNA, 21 bp, Artificial Sequence
  Description of Artificial Sequence: Synthetic oligonucleotide
cttgatgcgggtcccctcaga

SEQ ID NO: 1152 - DNA, 21 bp, Artificial Sequence
  Description of Artificial Sequence: Synthetic oligonucleotide
gatggagattttcttgatgcg

SEQ ID NO: 1153 - DNA, 21 bp, Artificial Sequence
  Description of Artificial Sequence: Synthetic oligonucleotide
ccgatgttcccttcgatggag

SEQ ID NO: 1154 - DNA, 21 bp, Artificial Sequence
  Description of Artificial Sequence: Synthetic oligonucleotide
tgaatatccttaaacaattgt

SEQ ID NO: 1155 - DNA, 21 bp, Artificial Sequence
  Description of Artificial Sequence: Synthetic oligonucleotide
ccaatcttcacacaattgttt

SEQ ID NO: 1156 - DNA, 21 bp, Artificial Sequence
  Description of Artificial Sequence: Synthetic oligonucleotide
aacaattgtgtgaagattggg

SEQ ID NO: 1157 - DNA, 21 bp, Artificial Sequence
  Description of Artificial Sequence: Synthetic oligonucleotide
aacattgcaccatctggcaac

SEQ ID NO: 1158 - DNA, 21 bp, Artificial Sequence
  Description of Artificial Sequence: Synthetic oligonucleotide
gaacattgcaccatctggcaa

SEQ ID NO: 1159 - DNA, 21 bp, Artificial Sequence
  Description of Artificial Sequence: Synthetic oligonucleotide
catacctcaaattcatcttga

SEQ ID NO: 1160 - DNA, 21 bp, Artificial Sequence
  Description of Artificial Sequence: Synthetic oligonucleotide
attttcatacctcaaattcat

SEQ ID NO: 1161 - DNA, 21 bp, Artificial Sequence
  Description of Artificial Sequence: Synthetic oligonucleotide
aattttattttcatacctcaa

SEQ ID NO: 1162 - DNA, 21 bp, Artificial Sequence
  Description of Artificial Sequence: Synthetic oligonucleotide
tgcacattcaaaataggaact

SEQ ID NO: 1163 - DNA, 21 bp, Artificial Sequence
  Description of Artificial Sequence: Synthetic oligonucleotide
tctgagacattgtaagttcct

SEQ ID NO: 1164 - DNA, 21 bp, Artificial Sequence
  Description of Artificial Sequence: Synthetic oligonucleotide
caatgtctcagaaaaatggtg

SEQ ID NO: 1165 - DNA, 21 bp, Artificial Sequence
  Description of Artificial Sequence: Synthetic oligonucleotide
accttccaaacatatgcctgt

SEQ ID NO: 1166 - DNA, 21 bp, Artificial Sequence
  Description of Artificial Sequence: Synthetic oligonucleotide
caaacatatgcctgtctcagt

SEQ ID NO: 1167 - DNA, 21 bp, Artificial Sequence
  Description of Artificial Sequence: Synthetic oligonucleotide
ccattcagagaggcaagctga

SEQ ID NO: 1168 - DNA, 21 bp, Artificial Sequence
  Description of Artificial Sequence: Synthetic oligonucleotide
cctctctgaatggcaagctca

SEQ ID NO: 1169 - DNA, 21 bp, Artificial Sequence
  Description of Artificial Sequence: Synthetic oligonucleotide
tctgcatctttgagcttgcca

SEQ ID NO: 1170 - DNA, 21 bp, Artificial Sequence
  Description of Artificial Sequence: Synthetic oligonucleotide
ttgaacgatctgtgtatagtg

SEQ ID NO: 1171 - DNA, 21 bp, Artificial Sequence
  Description of Artificial Sequence: Synthetic oligonucleotide
aggtatatttttgcatctaat

SEQ ID NO: 1172 - DNA, 21 bp, Artificial Sequence
  Description of Artificial Sequence: Synthetic oligonucleotide
tattttacaggttcttacgtc

SEQ ID NO: 1173 - DNA, 21 bp, Artificial Sequence
  Description of Artificial Sequence: Synthetic oligonucleotide
attttacaggttcttacgtct

SEQ ID NO: 1174 - DNA, 21 bp, Artificial Sequence
  Description of Artificial Sequence: Synthetic oligonucleotide
tggacgataatctagcaacag

SEQ ID NO: 1175 - DNA, 21 bp, Artificial Sequence
  Description of Artificial Sequence: Synthetic oligonucleotide
ggcattaacacttttggacga

SEQ ID NO: 1176 - DNA, 21 bp, Artificial Sequence
  Description of Artificial Sequence: Synthetic oligonucleotide
gagttgatgtcagtcacttgg

SEQ ID NO: 1177 - DNA, 21 bp, Artificial Sequence
  Description of Artificial Sequence: Synthetic oligonucleotide
caagttctgagtctcaactgt

SEQ ID NO: 1178 - DNA, 21 bp, Artificial Sequence
  Description of Artificial Sequence: Synthetic oligonucleotide
tggcagaattggccatcatga

SEQ ID NO: 1179 - DNA, 21 bp, Artificial Sequence
  Description of Artificial Sequence: Synthetic oligonucleotide
tttccttgggcaggtgaaagg

SEQ ID NO: 1180 - DNA, 21 bp, Artificial Sequence
  Description of Artificial Sequence: Synthetic oligonucleotide
ttggcagggcacgcagtctgg

SEQ ID NO: 1181 - DNA, 21 bp, Artificial Sequence
  Description of Artificial Sequence: Synthetic oligonucleotide
ccttcttggcagggcacgcag

SEQ ID NO: 1182 - DNA, 21 bp, Artificial Sequence
  Description of Artificial Sequence: Synthetic oligonucleotide
tctgtgtactccttcccttct

SEQ ID NO: 1183 - DNA, 21 bp, Artificial Sequence
  Description of Artificial Sequence: Synthetic oligonucleotide
gtctgtgtactccttcccttc

SEQ ID NO: 1184 - DNA, 21 bp, Artificial Sequence
  Description of Artificial Sequence: Synthetic oligonucleotide
gaagaaaaatgggctttgtct

SEQ ID NO: 1185 - DNA, 21 bp, Artificial Sequence
  Description of Artificial Sequence: Synthetic oligonucleotide
tcttccaaatgcagaagatgt

SEQ ID NO: 1186 - DNA, 21 bp, Artificial Sequence
  Description of Artificial Sequence: Synthetic oligonucleotide
atcacacaatctacatcttct

SEQ ID NO: 1187 - DNA, 21 bp, Artificial Sequence
  Description of Artificial Sequence: Synthetic oligonucleotide
aagactcttaccatgtccttc

SEQ ID NO: 1188 - DNA, 21 bp, Artificial Sequence
  Description of Artificial Sequence: Synthetic oligonucleotide
caaactgattttctaggctta

SEQ ID NO: 1189 - DNA, 21 bp, Artificial Sequence
  Description of Artificial Sequence: Synthetic oligonucleotide
gaagtggaaataaactgcacc

SEQ ID NO: 1190 - DNA, 21 bp, Artificial Sequence
  Description of Artificial Sequence: Synthetic oligonucleotide
gtattctgggtccgggtgcag

SEQ ID NO: 1191 - DNA, 21 bp, Artificial Sequence
  Description of Artificial Sequence: Synthetic oligonucleotide
catctgcacttggtattctgg

SEQ ID NO: 1192 - DNA, 21 bp, Artificial Sequence
  Description of Artificial Sequence: Synthetic oligonucleotide
ttttgtaactctactgtatgt

SEQ ID NO: 1193 - DNA, 21 bp, Artificial Sequence
  Description of Artificial Sequence: Synthetic oligonucleotide
tttgtaactctactgtatgtg

SEQ ID NO: 1194 - DNA, 21 bp, Artificial Sequence
  Description of Artificial Sequence: Synthetic oligonucleotide
cacttggtgttgctggtgagt

SEQ ID NO: 1195 - DNA, 21 bp, Artificial Sequence
  Description of Artificial Sequence: Synthetic oligonucleotide
gggtggctttgtcttcttctt

SEQ ID NO: 1196 - DNA, 21 bp, Artificial Sequence
  Description of Artificial Sequence: Synthetic oligonucleotide
gtcttcttcttttgccaattc

SEQ ID NO: 1197 - DNA, 21 bp, Artificial Sequence
  Description of Artificial Sequence: Synthetic oligonucleotide
tcttcttcttttgccaattcc

SEQ ID NO: 1198 - DNA, 21 bp, Artificial Sequence
  Description of Artificial Sequence: Synthetic oligonucleotide
gccaattccactaattgtttg

SEQ ID NO: 1199 - DNA, 21 bp, Artificial Sequence
  Description of Artificial Sequence: Synthetic oligonucleotide
ccccaaacaattagtggaatt

SEQ ID NO: 1200 - DNA, 21 bp, Artificial Sequence
  Description of Artificial Sequence: Synthetic oligonucleotide
aacaaagcaagaacttacccc

SEQ ID NO: 1201 - DNA, 21 bp, Artificial Sequence
  Description of Artificial Sequence: Synthetic oligonucleotide
ttctttcagtgaagagaaagg

SEQ ID NO: 1202 - DNA, 21 bp, Artificial Sequence
  Description of Artificial Sequence: Synthetic oligonucleotide
ctgtacttcctttctcttcac

SEQ ID NO: 1203 - DNA, 21 bp, Artificial Sequence
  Description of Artificial Sequence: Synthetic oligonucleotide
tgcatgttttctgtacttcct

SEQ ID NO: 1204 - DNA, 21 bp, Artificial Sequence
  Description of Artificial Sequence: Synthetic oligonucleotide
ctgcatgttttctgtacttcc

SEQ ID NO: 1205 - DNA, 21 bp, Artificial Sequence
  Description of Artificial Sequence: Synthetic oligonucleotide
tgtgctttctgcatgttttct

SEQ ID NO: 1206 - DNA, 21 bp, Artificial Sequence
  Description of Artificial Sequence: Synthetic oligonucleotide
ctgtgctttctgcatgttttc

SEQ ID NO: 1207 - DNA, 21 bp, Artificial Sequence
  Description of Artificial Sequence: Synthetic oligonucleotide
cctttctgtgctttctgcatg

SEQ ID NO: 1208 - DNA, 21 bp, Artificial Sequence
  Description of Artificial Sequence: Synthetic oligonucleotide
gttttcctttctgtgctttct

SEQ ID NO: 1209 - DNA, 21 bp, Artificial Sequence
  Description of Artificial Sequence: Synthetic oligonucleotide
aagttggagattcatgagaac

SEQ ID NO: 1210 - DNA, 21 bp, Artificial Sequence
  Description of Artificial Sequence: Synthetic oligonucleotide
aatacctacaggatttaaagt

SEQ ID NO: 1211 - DNA, 21 bp, Artificial Sequence
  Description of Artificial Sequence: Synthetic oligonucleotide
ttgctttctaggaaacagtgg

SEQ ID NO: 1212 - DNA, 21 bp, Artificial Sequence
  Description of Artificial Sequence: Synthetic oligonucleotide
ctaggaaacagtggcaataaa

SEQ ID NO: 1213 - DNA, 21 bp, Artificial Sequence
  Description of Artificial Sequence: Synthetic oligonucleotide
ccagataaatttattgccact

SEQ ID NO: 1214 - DNA, 21 bp, Artificial Sequence
  Description of Artificial Sequence: Synthetic oligonucleotide
ctatttttcagatgttgactt

SEQ ID NO: 1215 - DNA, 21 bp, Artificial Sequence
  Description of Artificial Sequence: Synthetic oligonucleotide
tcagatgttgacttgagtaaa

SEQ ID NO: 1216 - DNA, 21 bp, Artificial Sequence
  Description of Artificial Sequence: Synthetic oligonucleotide
agtaaatatatcaccactatt

SEQ ID NO: 1217 - DNA, 21 bp, Artificial Sequence
  Description of Artificial Sequence: Synthetic oligonucleotide
aacttgacttagtgtcatgac

SEQ ID NO: 1218 - DNA, 21 bp, Artificial Sequence
  Description of Artificial Sequence: Synthetic oligonucleotide
gaacaaagcctttaacttgac

SEQ ID NO: 1219 - DNA, 21 bp, Artificial Sequence
  Description of Artificial Sequence: Synthetic oligonucleotide
gttcgaaagaatggtgtcaat

SEQ ID NO: 1220 - DNA, 21 bp, Artificial Sequence
  Description of Artificial Sequence: Synthetic oligonucleotide
attgacaccattctttcgaac

SEQ ID NO: 1221 - DNA, 21 bp, Artificial Sequence
  Description of Artificial Sequence: Synthetic oligonucleotide
ttcgaaagaatggtgtcaatg

SEQ ID NO: 1222 - DNA, 21 bp, Artificial Sequence
  Description of Artificial Sequence: Synthetic oligonucleotide
ggcttcattgacaccattctt

SEQ ID NO: 1223 - DNA, 21 bp, Artificial Sequence
  Description of Artificial Sequence: Synthetic oligonucleotide
gtaattggcatcaacttcatg

SEQ ID NO: 1224 - DNA, 21 bp, Artificial Sequence
  Description of Artificial Sequence: Synthetic oligonucleotide
catgaagttgatgccaattac

SEQ ID NO: 1225 - DNA, 21 bp, Artificial Sequence
  Description of Artificial Sequence: Synthetic oligonucleotide
tttccatgaagttgatgccaa

SEQ ID NO: 1226 - DNA, 21 bp, Artificial Sequence
  Description of Artificial Sequence: Synthetic oligonucleotide
tttctttccatgaagttgatg

SEQ ID NO: 1227 - DNA, 21 bp, Artificial Sequence
  Description of Artificial Sequence: Synthetic oligonucleotide
atggaaagaaagaagcgtatg

SEQ ID NO: 1228 - DNA, 21 bp, Artificial Sequence
  Description of Artificial Sequence: Synthetic oligonucleotide
atcaatgtgtcatacgcttct

SEQ ID NO: 1229 - DNA, 21 bp, Artificial Sequence
  Description of Artificial Sequence: Synthetic oligonucleotide
ttgagatctttaatcaatgtg

SEQ ID NO: 1230 - DNA, 21 bp, Artificial Sequence
  Description of Artificial Sequence: Synthetic oligonucleotide
tttgagatctttaatcaatgt

SEQ ID NO: 1231 - DNA, 21 bp, Artificial Sequence
  Description of Artificial Sequence: Synthetic oligonucleotide
ctctgcaagagtacaaagatt

SEQ ID NO: 1232 - DNA, 21 bp, Artificial Sequence
  Description of Artificial Sequence: Synthetic oligonucleotide
tactcttgcagagaaaattca

SEQ ID NO: 1233 - DNA, 21 bp, Artificial Sequence
  Description of Artificial Sequence: Synthetic oligonucleotide
aggatgatagtctgaattttc

SEQ ID NO: 1234 - DNA, 21 bp, Artificial Sequence
  Description of Artificial Sequence: Synthetic oligonucleotide
ctgagtcactagtaatgtcct

SEQ ID NO: 1235 - DNA, 21 bp, Artificial Sequence
  Description of Artificial Sequence: Synthetic oligonucleotide
aattttctgagtcactagtaa

SEQ ID NO: 1236 - DNA, 21 bp, Artificial Sequence
  Description of Artificial Sequence: Synthetic oligonucleotide
tgaagtttgaattttctgagt

SEQ ID NO: 1237 - DNA, 21 bp, Artificial Sequence
  Description of Artificial Sequence: Synthetic oligonucleotide
atttctgaagtttgaattttc

SEQ ID NO: 1238 - DNA, 21 bp, Artificial Sequence
  Description of Artificial Sequence: Synthetic oligonucleotide
gatttcatttctgaagtttga

SEQ ID NO: 1239 - DNA, 21 bp, Artificial Sequence
  Description of Artificial Sequence: Synthetic oligonucleotide
ggatttcatttctgaagtttg

SEQ ID NO: 1240 - DNA, 21 bp, Artificial Sequence
  Description of Artificial Sequence: Synthetic oligonucleotide
agaaatgaaatccaaagcttg

SEQ ID NO: 1241 - DNA, 21 bp, Artificial Sequence
  Description of Artificial Sequence: Synthetic oligonucleotide
tcactctagaccaagctttgg

SEQ ID NO: 1242 - DNA, 21 bp, Artificial Sequence
  Description of Artificial Sequence: Synthetic oligonucleotide
ttgtttttcactctagaccaa

SEQ ID NO: 1243 - DNA, 21 bp, Artificial Sequence
  Description of Artificial Sequence: Synthetic oligonucleotide
gtctagagtgaaaaacaacaa

SEQ ID NO: 1244 - DNA, 21 bp, Artificial Sequence
  Description of Artificial Sequence: Synthetic oligonucleotide
tcttctgcaagctccatgttt

SEQ ID NO: 1245 - DNA, 21 bp, Artificial Sequence
  Description of Artificial Sequence: Synthetic oligonucleotide
tctgctccttttggtgactgg

SEQ ID NO: 1246 - DNA, 21 bp, Artificial Sequence
  Description of Artificial Sequence: Synthetic oligonucleotide
cccagcgccggcatcggccgc

SEQ ID NO: 1247 - DNA, 21 bp, Artificial Sequence
  Description of Artificial Sequence: Synthetic oligonucleotide
gcatgggcattcttcatggct

SEQ ID NO: 1248 - DNA, 21 bp, Artificial Sequence
  Description of Artificial Sequence: Synthetic oligonucleotide
gacgaggtgcgggaggccttg

SEQ ID NO: 1249 - DNA, 21 bp, Artificial Sequence
  Description of Artificial Sequence: Synthetic oligonucleotide
gtgtttttaatgtgactctca

SEQ ID NO: 1250 - DNA, 21 bp, Artificial Sequence
  Description of Artificial Sequence: Synthetic oligonucleotide
cgtaggattttgtgtttttaa

SEQ ID NO: 1251 - DNA, 21 bp, Artificial Sequence
  Description of Artificial Sequence: Synthetic oligonucleotide
cttagtgctgagactcattct

SEQ ID NO: 1252 - DNA, 21 bp, Artificial Sequence
  Description of Artificial Sequence: Synthetic oligonucleotide
ccttagtgctgagactcattc

SEQ ID NO: 1253 - DNA, 21 bp, Artificial Sequence
  Description of Artificial Sequence: Synthetic oligonucleotide
tttggtactttacagtttatt

SEQ ID NO: 1254 - DNA, 21 bp, Artificial Sequence
  Description of Artificial Sequence: Synthetic oligonucleotide
cagtttattaaatagatgttt

SEQ ID NO: 1255 - DNA, 21 bp, Artificial Sequence
  Description of Artificial Sequence: Synthetic oligonucleotide
ttaaatagatgtttatatgga

SEQ ID NO: 1256 - DNA, 21 bp, Artificial Sequence
  Description of Artificial Sequence: Synthetic oligonucleotide
acctgcaaaatgaatatggtg

SEQ ID NO: 1257 - DNA, 21 bp, Artificial Sequence
  Description of Artificial Sequence: Synthetic oligonucleotide
gcaggtgaaattcctgagatg

SEQ ID NO: 1258 - DNA, 21 bp, Artificial Sequence
  Description of Artificial Sequence: Synthetic oligonucleotide
tggtatgttggcattaagttg

SEQ ID NO: 1259 - DNA, 21 bp, Artificial Sequence
  Description of Artificial Sequence: Synthetic oligonucleotide
ccaacttaatgccaacatacc

SEQ ID NO: 1260 - DNA, 21 bp, Artificial Sequence
  Description of Artificial Sequence: Synthetic oligonucleotide
ctttgctgggcctttttccca

SEQ ID NO: 1261 - DNA, 21 bp, Artificial Sequence
  Description of Artificial Sequence: Synthetic oligonucleotide
tcccatgcctgcctttactct

SEQ ID NO: 1262 - DNA, 21 bp, Artificial Sequence
  Description of Artificial Sequence: Synthetic oligonucleotide
cccatgcctgcctttactctg

SEQ ID NO: 1263 - DNA, 21 bp, Artificial Sequence
  Description of Artificial Sequence: Synthetic oligonucleotide
tttaataggatcttcttcaaa

SEQ ID NO: 1264 - DNA, 21 bp, Artificial Sequence
  Description of Artificial Sequence: Synthetic oligonucleotide
atttaataggatcttcttcaa

SEQ ID NO: 1265 - DNA, 21 bp, Artificial Sequence
  Description of Artificial Sequence: Synthetic oligonucleotide
aagaagatcctattaaataaa

SEQ ID NO: 1266 - DNA, 21 bp, Artificial Sequence
  Description of Artificial Sequence: Synthetic oligonucleotide
agtgaacgttcacggccaggc

SEQ ID NO: 1267 - DNA, 21 bp, Artificial Sequence
  Description of Artificial Sequence: Synthetic oligonucleotide
tttgagaatcaaaatcggtga

SEQ ID NO: 1268 - DNA, 21 bp, Artificial Sequence
  Description of Artificial Sequence: Synthetic oligonucleotide
tgacacatttgtttgagaatc

SEQ ID NO: 1269 - DNA, 21 bp, Artificial Sequence
  Description of Artificial Sequence: Synthetic oligonucleotide
gattctcaaacaaatgtgtca

SEQ ID NO: 1270 - DNA, 21 bp, Artificial Sequence
  Description of Artificial Sequence: Synthetic oligonucleotide
cacatgcaaagtcagatttgt

SEQ ID NO: 1271 - DNA, 21 bp, Artificial Sequence
  Description of Artificial Sequence: Synthetic oligonucleotide
gtgccttcgcaggctgtttcc

SEQ ID NO: 1272 - DNA, 21 bp, Artificial Sequence
  Description of Artificial Sequence: Synthetic oligonucleotide
agacatcattgaccagagctc

SEQ ID NO: 1273 - DNA, 21 bp, Artificial Sequence
  Description of Artificial Sequence: Synthetic oligonucleotide
ttagtaaaaagagggttttgg

SEQ ID NO: 1274 - DNA, 21 bp, Artificial Sequence
  Description of Artificial Sequence: Synthetic oligonucleotide
actaagaaacagtgagccttg

SEQ ID NO: 1275 - DNA, 21 bp, Artificial Sequence
  Description of Artificial Sequence: Synthetic oligonucleotide
tcccgtgtcattctctggact

SEQ ID NO: 1276 - DNA, 21 bp, Artificial Sequence
  Description of Artificial Sequence: Synthetic oligonucleotide
ttcccgtgtcattctctggac

SEQ ID NO: 1277 - DNA, 21 bp, Artificial Sequence
  Description of Artificial Sequence: Synthetic oligonucleotide
tccctgtctgccaaaaaatct

SEQ ID NO: 1278 - DNA, 21 bp, Artificial Sequence
  Description of Artificial Sequence: Synthetic oligonucleotide
aattcctccacttcaacacct

SEQ ID NO: 1279 - DNA, 21 bp, Artificial Sequence
  Description of Artificial Sequence: Synthetic oligonucleotide
tcaaccctgagttaaaacaca

SEQ ID NO: 1280 - DNA, 21 bp, Artificial Sequence
  Description of Artificial Sequence: Synthetic oligonucleotide
ctcaaccctgagttaaaacac

SEQ ID NO: 1281 - DNA, 21 bp, Artificial Sequence
  Description of Artificial Sequence: Synthetic oligonucleotide
tcctgaaggtagctgttttct

SEQ ID NO: 1282 - DNA, 21 bp, Artificial Sequence
  Description of Artificial Sequence: Synthetic oligonucleotide
gtcctgaaggtagctgttttc

SEQ ID NO: 1283 - DNA, 21 bp, Artificial Sequence
  Description of Artificial Sequence: Synthetic oligonucleotide
aactcagggttgagaaaacag

SEQ ID NO: 1284 - DNA, 21 bp, Artificial Sequence
  Description of Artificial Sequence: Synthetic oligonucleotide
actcagggttgagaaaacagc

SEQ ID NO: 1285 - DNA, 21 bp, Artificial Sequence
  Description of Artificial Sequence: Synthetic oligonucleotide
ctggcctggaggctatccagc

SEQ ID NO: 1286 - DNA, 21 bp, Artificial Sequence
  Description of Artificial Sequence: Synthetic oligonucleotide
tcccgatattcctcaggtact

SEQ ID NO: 1287 - DNA, 21 bp, Artificial Sequence
  Description of Artificial Sequence: Synthetic oligonucleotide
ccgatattcctcaggtactcc

SEQ ID NO: 1288 - DNA, 21 bp, Artificial Sequence
  Description of Artificial Sequence: Synthetic oligonucleotide
agtaagtcaacttcaatgtcg

SEQ ID NO: 1289 - DNA, 21 bp, Artificial Sequence
  Description of Artificial Sequence: Synthetic oligonucleotide
aattctctctccattcttcag

SEQ ID NO: 1290 - DNA, 21 bp, Artificial Sequence
  Description of Artificial Sequence: Synthetic oligonucleotide
caattctctctccattcttca

SEQ ID NO: 1291 - DNA, 21 bp, Artificial Sequence
  Description of Artificial Sequence: Synthetic oligonucleotide
cagcaaggactggtctttcta

SEQ ID NO: 1292 - DNA, 21 bp, Artificial Sequence
  Description of Artificial Sequence: Synthetic oligonucleotide
agtgggggtgaattcagtgta

SEQ ID NO: 1293 - DNA, 21 bp, Artificial Sequence
  Description of Artificial Sequence: Synthetic oligonucleotide
cagtgggggtgaattcagtgt

SEQ ID NO: 1294 - DNA, 21 bp, Artificial Sequence
  Description of Artificial Sequence: Synthetic oligonucleotide
ctatctcttgtactacactga

SEQ ID NO: 1295 - DNA, 21 bp, Artificial Sequence
  Description of Artificial Sequence: Synthetic oligonucleotide
tactacactgaattcaccccc

SEQ ID NO: 1296 - DNA, 21 bp, Artificial Sequence
  Description of Artificial Sequence: Synthetic oligonucleotide
ggctgtgacaaagtcacatgg

SEQ ID NO: 1297 - DNA, 21 bp, Artificial Sequence
  Description of Artificial Sequence: Synthetic oligonucleotide
caaaagaatgtaagacttacc

SEQ ID NO: 1298 - DNA, 21 bp, Artificial Sequence
  Description of Artificial Sequence: Synthetic oligonucleotide
cctccatgatgctgcttacat

SEQ ID NO: 1299 - DNA, 21 bp, Artificial Sequence
  Description of Artificial Sequence: Synthetic oligonucleotide
ttcatagatcgagacatgtaa

SEQ ID NO: 1300 - DNA, 21 bp, Artificial Sequence
  Description of Artificial Sequence: Synthetic oligonucleotide
tcatagatcgagacatgtaag

SEQ ID NO: 1301 - DNA, 21 bp, Artificial Sequence
  Description of Artificial Sequence: Synthetic oligonucleotide
catagatcgagacatgtaagc

SEQ ID NO: 1302 - DNA, 21 bp, Artificial Sequence
  Description of Artificial Sequence: Synthetic oligonucleotide
atagatcgagacatgtaagca

SEQ ID NO: 1303 - DNA, 21 bp, Artificial Sequence
  Description of Artificial Sequence: Synthetic oligonucleotide
ccttggggctctgacaggtag

SEQ ID NO: 1304 - DNA, 21 bp, Artificial Sequence
  Description of Artificial Sequence: Synthetic oligonucleotide
accttggggctctgacaggta

SEQ ID NO: 1305 - DNA, 21 bp, Artificial Sequence
  Description of Artificial Sequence: Synthetic oligonucleotide
ccggcctttttaccttggggc

SEQ ID NO: 1306 - DNA, 21 bp, Artificial Sequence
  Description of Artificial Sequence: Synthetic oligonucleotide
ctcccagaacccgacacagac

SEQ ID NO: 1307 - DNA, 21 bp, Artificial Sequence
  Description of Artificial Sequence: Synthetic oligonucleotide
tgggctcaggtgcttcctcac

SEQ ID NO: 1308 - DNA, 21 bp, Artificial Sequence
  Description of Artificial Sequence: Synthetic oligonucleotide
ctgggctcaggtgcttcctca

SEQ ID NO: 1309 - DNA, 21 bp, Artificial Sequence
  Description of Artificial Sequence: Synthetic oligonucleotide
cttgtctgggcagcggaactg

SEQ ID NO: 1310 - DNA, 21 bp, Artificial Sequence
  Description of Artificial Sequence: Synthetic oligonucleotide
ctcaaagtagagcacatagga

SEQ ID NO: 1311 - DNA, 21 bp, Artificial Sequence
  Description of Artificial Sequence: Synthetic oligonucleotide
tcaaagtagagcacataggac

SEQ ID NO: 1312 - DNA, 21 bp, Artificial Sequence
  Description of Artificial Sequence: Synthetic oligonucleotide
tgcccaacttctgctggcatc

SEQ ID NO: 1313 - DNA, 21 bp, Artificial Sequence
  Description of Artificial Sequence: Synthetic oligonucleotide
tgacttttctgcccaacttct

SEQ ID NO: 1314 - DNA, 21 bp, Artificial Sequence
  Description of Artificial Sequence: Synthetic oligonucleotide
tctgcagccttcccagaggag

SEQ ID NO: 1315 - DNA, 21 bp, Artificial Sequence
  Description of Artificial Sequence: Synthetic oligonucleotide
tccaggcgcatctggccggag

SEQ ID NO: 1316 - DNA, 21 bp, Artificial Sequence
  Description of Artificial Sequence: Synthetic oligonucleotide
tccagttcctcgttgagctgc

SEQ ID NO: 1317 - DNA, 21 bp, Artificial Sequence
  Description of Artificial Sequence: Synthetic oligonucleotide
ccagagcccatggggcagagt

SEQ ID NO: 1318 - DNA, 21 bp, Artificial Sequence
  Description of Artificial Sequence: Synthetic oligonucleotide
tccccaccatctccactctgc

SEQ ID NO: 1319 - DNA, 21 bp, Artificial Sequence
  Description of Artificial Sequence: Synthetic oligonucleotide
ctcgggaggtcagggcaggtt

SEQ ID NO: 1320 - DNA, 21 bp, Artificial Sequence
  Description of Artificial Sequence: Synthetic oligonucleotide
gaagcttgttggagacctctc

SEQ ID NO: 1321 - DNA, 21 bp, Artificial Sequence
  Description of Artificial Sequence: Synthetic oligonucleotide
ggaagcttgttggagacctct

SEQ ID NO: 1322 - DNA, 21 bp, Artificial Sequence
  Description of Artificial Sequence: Synthetic oligonucleotide
cagagccggtggagcagttct

SEQ ID NO: 1323 - DNA, 21 bp, Artificial Sequence
  Description of Artificial Sequence: Synthetic oligonucleotide
cccagcacagcaatcactcgt

SEQ ID NO: 1324 - DNA, 21 bp, Artificial Sequence
  Description of Artificial Sequence: Synthetic oligonucleotide
tcttctctgtcccctgccatt

SEQ ID NO: 1325 - DNA, 21 bp, Artificial Sequence
  Description of Artificial Sequence: Synthetic oligonucleotide
agccacatcttgaagagacct

SEQ ID NO: 1326 - DNA, 21 bp, Artificial Sequence
  Description of Artificial Sequence: Synthetic oligonucleotide
ccagaagaagctgctccgagg

SEQ ID NO: 1327 - DNA, 21 bp, Artificial Sequence
  Description of Artificial Sequence: Synthetic oligonucleotide
cagaagaagctgctccgaggt

SEQ ID NO: 1328 - DNA, 21 bp, Artificial Sequence
  Description of Artificial Sequence: Synthetic oligonucleotide
agctgtccggcttctccatgg

SEQ ID NO: 1329 - DNA, 21 bp, Artificial Sequence
  Description of Artificial Sequence: Synthetic oligonucleotide
agagctcagggatgacagagc

SEQ ID NO: 1330 - DNA, 21 bp, Artificial Sequence
  Description of Artificial Sequence: Synthetic oligonucleotide
tgccgggcagtgtgccagctc

SEQ ID NO: 1331 - DNA, 21 bp, Artificial Sequence
  Description of Artificial Sequence: Synthetic oligonucleotide
atgtctgcggcccagctccca

SEQ ID NO: 1332 - DNA, 21 bp, Artificial Sequence
  Description of Artificial Sequence: Synthetic oligonucleotide
gccatcgcccaggtcctcacg

SEQ ID NO: 1333 - DNA, 21 bp, Artificial Sequence
  Description of Artificial Sequence: Synthetic oligonucleotide
gccactcagagccagccacag

SEQ ID NO: 1334 - DNA, 21 bp, Artificial Sequence
  Description of Artificial Sequence: Synthetic oligonucleotide
tggctgggctgatcttccagc

SEQ ID NO: 1335 - DNA, 21 bp, Artificial Sequence
  Description of Artificial Sequence: Synthetic oligonucleotide
gcagcacgtggtacaggagct

SEQ ID NO: 1336 - DNA, 21 bp, Artificial Sequence
  Description of Artificial Sequence: Synthetic oligonucleotide
ctgggcacccgcctcacgcct

SEQ ID NO: 1337 - DNA, 21 bp, Artificial Sequence
  Description of Artificial Sequence: Synthetic oligonucleotide
tgggcacccgcctcacgcctc

SEQ ID NO: 1338 - DNA, 21 bp, Artificial Sequence
  Description of Artificial Sequence: Synthetic oligonucleotide
cccctctggattggggagcct

SEQ ID NO: 1339 - DNA, 21 bp, Artificial Sequence
  Description of Artificial Sequence: Synthetic oligonucleotide
aaaggctcgatggtgaacttc

SEQ ID NO: 1340 - DNA, 21 bp, Artificial Sequence
  Description of Artificial Sequence: Synthetic oligonucleotide
ccaggtcttccacatccttca

SEQ ID NO: 1341 - DNA, 21 bp, Artificial Sequence
  Description of Artificial Sequence: Synthetic oligonucleotide
aaagccaagtccctgaaggat

SEQ ID NO: 1342 - DNA, 21 bp, Artificial Sequence
  Description of Artificial Sequence: Synthetic oligonucleotide
ggtcccgaacagcagggagct

SEQ ID NO: 1343 - DNA, 21 bp, Artificial Sequence
  Description of Artificial Sequence: Synthetic oligonucleotide
tttaggtcccgaacagcaggg

SEQ ID NO: 1344 - DNA, 21 bp, Artificial Sequence
  Description of Artificial Sequence: Synthetic oligonucleotide
cttacgcaaactccagtttct

SEQ ID NO: 1345 - DNA, 21 bp, Artificial Sequence
  Description of Artificial Sequence: Synthetic oligonucleotide
cctcctaggctgggccctgtc

SEQ ID NO: 1346 - DNA, 21 bp, Artificial Sequence
  Description of Artificial Sequence: Synthetic oligonucleotide
gggaaagcctgggggcctgag

SEQ ID NO: 1347 - DNA, 21 bp, Artificial Sequence
  Description of Artificial Sequence: Synthetic oligonucleotide
cccaaactggtgcggatcctc

SEQ ID NO: 1348 - DNA, 21 bp, Artificial Sequence
  Description of Artificial Sequence: Synthetic oligonucleotide
ctccctgcagcatctggagtg

SEQ ID NO: 1349 - DNA, 21 bp, Artificial Sequence
  Description of Artificial Sequence: Synthetic oligonucleotide
caaggacttcagctgggggaa

SEQ ID NO: 1350 - DNA, 21 bp, Artificial Sequence
  Description of Artificial Sequence: Synthetic oligonucleotide
taggcacccaggtcagtgatg

SEQ ID NO: 1351 - DNA, 21 bp, Artificial Sequence
  Description of Artificial Sequence: Synthetic oligonucleotide
cgacagcttgtacaataactg

SEQ ID NO: 1352 - DNA, 21 bp, Artificial Sequence
  Description of Artificial Sequence: Synthetic oligonucleotide
tcttgccagcgtccagtacaa

SEQ ID NO: 1353 - DNA, 21 bp, Artificial Sequence
  Description of Artificial Sequence: Synthetic oligonucleotide
cccggcctttttaccttgggg

SEQ ID NO: 1354 - DNA, 21 bp, Artificial Sequence
  Description of Artificial Sequence: Synthetic oligonucleotide
cctcccaggcagctcacagtg

SEQ ID NO: 1355 - DNA, 21 bp, Artificial Sequence
  Description of Artificial Sequence: Synthetic oligonucleotide
tccagccaggtccatctggtc

SEQ ID NO: 1356 - DNA, 21 bp, Artificial Sequence
  Description of Artificial Sequence: Synthetic oligonucleotide
ttctccagccaggtccatctg

SEQ ID NO: 1357 - DNA, 21 bp, Artificial Sequence
  Description of Artificial Sequence: Synthetic oligonucleotide
atcaccttccatgtcacacaa

SEQ ID NO: 1358 - DNA, 21 bp, Artificial Sequence
  Description of Artificial Sequence: Synthetic oligonucleotide
tctgggctcaggtgcttcctc

SEQ ID NO: 1359 - DNA, 21 bp, Artificial Sequence
  Description of Artificial Sequence: Synthetic oligonucleotide
tgccaatatcggtgaggaagc

SEQ ID NO: 1360 - DNA, 21 bp, Artificial Sequence
  Description of Artificial Sequence: Synthetic oligonucleotide
caggactcccagctggagggc

SEQ ID NO: 1361 - DNA, 21 bp, Artificial Sequence
  Description of Artificial Sequence: Synthetic oligonucleotide
tctgacttttctgcccaactt

SEQ ID NO: 1362 - DNA, 21 bp, Artificial Sequence
  Description of Artificial Sequence: Synthetic oligonucleotide
cagtgcctttctccagttcct

SEQ ID NO: 1363 - DNA, 21 bp, Artificial Sequence
  Description of Artificial Sequence: Synthetic oligonucleotide
gctggcctggggcacctcacc

SEQ ID NO: 1364 - DNA, 21 bp, Artificial Sequence
  Description of Artificial Sequence: Synthetic oligonucleotide
gctccatcagccactgacctg

SEQ ID NO: 1365 - DNA, 21 bp, Artificial Sequence
  Description of Artificial Sequence: Synthetic oligonucleotide
cctgtcatgtttgctcgggag

SEQ ID NO: 1366 - DNA, 21 bp, Artificial Sequence
  Description of Artificial Sequence: Synthetic oligonucleotide
tccatctccagagcacaagac

SEQ ID NO: 1367 - DNA, 21 bp, Artificial Sequence
  Description of Artificial Sequence: Synthetic oligonucleotide
ttggagacctctccagctgcc

SEQ ID NO: 1368 - DNA, 21 bp, Artificial Sequence
  Description of Artificial Sequence: Synthetic oligonucleotide
gcagagccggtggagcagttc

SEQ ID NO: 1369 - DNA, 21 bp, Artificial Sequence
  Description of Artificial Sequence: Synthetic oligonucleotide
ctgctgctcctctccagcctg

SEQ ID NO: 1370 - DNA, 21 bp, Artificial Sequence
  Description of Artificial Sequence: Synthetic oligonucleotide
gcagccaacagcacctcagcc

SEQ ID NO: 1371 - DNA, 21 bp, Artificial Sequence
  Description of Artificial Sequence: Synthetic oligonucleotide
gcccagcacagcaatcactcg

SEQ ID NO: 1372 - DNA, 21 bp, Artificial Sequence
  Description of Artificial Sequence: Synthetic oligonucleotide
agccatcagaagcagagatct

SEQ ID NO: 1373 - DNA, 21 bp, Artificial Sequence
  Description of Artificial Sequence: Synthetic oligonucleotide
cgctgtcaagtccagttctac

SEQ ID NO: 1374 - DNA, 21 bp, Artificial Sequence
  Description of Artificial Sequence: Synthetic oligonucleotide
ccctgttttctttcagactgt

SEQ ID NO: 1375 - DNA, 21 bp, Artificial Sequence
  Description of Artificial Sequence: Synthetic oligonucleotide
ctttcagactgtggcttcacc

SEQ ID NO: 1376 - DNA, 21 bp, Artificial Sequence
  Description of Artificial Sequence: Synthetic oligonucleotide
tttcagactgtggcttcacct

SEQ ID NO: 1377 - DNA, 21 bp, Artificial Sequence
  Description of Artificial Sequence: Synthetic oligonucleotide
cagactgtggcttcacctccg

SEQ ID NO: 1378 - DNA, 21 bp, Artificial Sequence
  Description of Artificial Sequence: Synthetic oligonucleotide
agactgtggcttcacctccgg

SEQ ID NO: 1379 - DNA, 21 bp, Artificial Sequence
  Description of Artificial Sequence: Synthetic oligonucleotide
ccggaggtgaagccacagtct

SEQ ID NO: 1380 - DNA, 21 bp, Artificial Sequence
  Description of Artificial Sequence: Synthetic oligonucleotide
tcaacagagtcttaccagcaa

SEQ ID NO: 1381 - DNA, 21 bp, Artificial Sequence
  Description of Artificial Sequence: Synthetic oligonucleotide
ccagcaaggggtcctgtctgc

SEQ ID NO: 1382 - DNA, 21 bp, Artificial Sequence
  Description of Artificial Sequence: Synthetic oligonucleotide
ctagggaaggccaccttgtat

SEQ ID NO: 1383 - DNA, 21 bp, Artificial Sequence
  Description of Artificial Sequence: Synthetic oligonucleotide
tatgccgtgctggtcagtgcc

SEQ ID NO: 1384 - DNA, 21 bp, Artificial Sequence
  Description of Artificial Sequence: Synthetic oligonucleotide
ccatggccatcagcacgaggg

SEQ ID NO: 1385 - DNA, 21 bp, Artificial Sequence
  Description of Artificial Sequence: Synthetic oligonucleotide
cctagcaagatctcatagagg

SEQ ID NO: 1386 - DNA, 21 bp, Artificial Sequence
  Description of Artificial Sequence: Synthetic oligonucleotide
cacaggtcaagagaaaggatt

SEQ ID NO: 1387 - DNA, 21 bp, Artificial Sequence
  Description of Artificial Sequence: Synthetic oligonucleotide
gagctagcctctggaatcctt

SEQ ID NO: 1388 - DNA, 21 bp, Artificial Sequence
  Description of Artificial Sequence: Synthetic oligonucleotide
tagtaccgctcctggaaggtt

SEQ ID NO: 1389 - DNA, 21 bp, Artificial Sequence
  Description of Artificial Sequence: Synthetic oligonucleotide
atcttgtagtaccgctcctgg

SEQ ID NO: 1390 - DNA, 21 bp, Artificial Sequence
  Description of Artificial Sequence: Synthetic oligonucleotide
cttcatcttgtagtaccgctc

SEQ ID NO: 1391 - DNA, 21 bp, Artificial Sequence
  Description of Artificial Sequence: Synthetic oligonucleotide
ctttccaggggagatggatcc

SEQ ID NO: 1392 - DNA, 21 bp, Artificial Sequence
  Description of Artificial Sequence: Synthetic oligonucleotide
ccaggggagatggatcctatc

SEQ ID NO: 1393 - DNA, 21 bp, Artificial Sequence
  Description of Artificial Sequence: Synthetic oligonucleotide
caggggagatggatcctatct

SEQ ID NO: 1394 - DNA, 21 bp, Artificial Sequence
  Description of Artificial Sequence: Synthetic oligonucleotide
ctaaccatcagcattttgagt

SEQ ID NO: 1395 - DNA, 21 bp, Artificial Sequence
  Description of Artificial Sequence: Synthetic oligonucleotide
gagttttttctctgtcgctct

SEQ ID NO: 1396 - DNA, 21 bp, Artificial Sequence
  Description of Artificial Sequence: Synthetic oligonucleotide
agttttttctctgtcgctctg

SEQ ID NO: 1397 - DNA, 21 bp, Artificial Sequence
  Description of Artificial Sequence: Synthetic oligonucleotide
tctgtcgctctgttggtcatc

SEQ ID NO: 1398 - DNA, 21 bp, Artificial Sequence
  Description of Artificial Sequence: Synthetic oligonucleotide
cataacacacaggccaagatg

SEQ ID NO: 1399 - DNA, 21 bp, Artificial Sequence
  Description of Artificial Sequence: Synthetic oligonucleotide
atgtcctttcacccatcaacc

SEQ ID NO: 1400 - DNA, 21 bp, Artificial Sequence
  Description of Artificial Sequence: Synthetic oligonucleotide
cacccatcaacccgtagggat

SEQ ID NO: 1401 - DNA, 21 bp, Artificial Sequence
  Description of Artificial Sequence: Synthetic oligonucleotide
acccatcaacccgtagggatg

SEQ ID NO: 1402 - DNA, 21 bp, Artificial Sequence
  Description of Artificial Sequence: Synthetic oligonucleotide
ctcatacaccacgaagcgcag

SEQ ID NO: 1403 - DNA, 21 bp, Artificial Sequence
  Description of Artificial Sequence: Synthetic oligonucleotide
cctttctgcgcttcgtggtgt

SEQ ID NO: 1404 - DNA, 21 bp, Artificial Sequence
  Description of Artificial Sequence: Synthetic oligonucleotide
ctgcgcttcgtggtgtatgag

SEQ ID NO: 1405 - DNA, 21 bp, Artificial Sequence
  Description of Artificial Sequence: Synthetic oligonucleotide
tgcgcttcgtggtgtatgagg

SEQ ID NO: 1406 - DNA, 21 bp, Artificial Sequence
  Description of Artificial Sequence: Synthetic oligonucleotide
gtggtgtatgaggaagacatg

SEQ ID NO: 1407 - DNA, 21 bp, Artificial Sequence
  Description of Artificial Sequence: Synthetic oligonucleotide
gtcctttccacaagatatata

SEQ ID NO: 1408 - DNA, 21 bp, Artificial Sequence
  Description of Artificial Sequence: Synthetic oligonucleotide
gatttcttggctttatatatc

SEQ ID NO: 1409 - DNA, 21 bp, Artificial Sequence
  Description of Artificial Sequence: Synthetic oligonucleotide
ttggctttatatatcttgtgg

SEQ ID NO: 1410 - DNA, 21 bp, Artificial Sequence
  Description of Artificial Sequence: Synthetic oligonucleotide
gctttatatatcttgtggaaa

SEQ ID NO: 1411 - DNA, 21 bp, Artificial Sequence
  Description of Artificial Sequence: Synthetic oligonucleotide
atatatcttgtggaaaggacg

SEQ ID NO: 1412 - DNA, 21 bp, Artificial Sequence
  Description of Artificial Sequence: Synthetic oligonucleotide
tatatcttgtggaaaggacga

SEQ ID NO: 1413 - DNA, 21 bp, Artificial Sequence
  Description of Artificial Sequence: Synthetic oligonucleotide
tggaaaggacgaaacaccgtg

SEQ ID NO: 1414 - DNA, 21 bp, Artificial Sequence
  Description of Artificial Sequence: Synthetic oligonucleotide
ttgcagaagcgggcccaggat

SEQ ID NO: 1415 - DNA, 21 bp, Artificial Sequence
  Description of Artificial Sequence: Synthetic oligonucleotide
ttgcagaagcgggcccaggat

SEQ ID NO: 1416 - DNA, 21 bp, Artificial Sequence
  Description of Artificial Sequence: Synthetic oligonucleotide
tatgctgaacacctgatgccg

SEQ ID NO: 1417 - DNA, 21 bp, Artificial Sequence
  Description of Artificial Sequence: Synthetic oligonucleotide
ccagggtcggccggtgcccgt

SEQ ID NO: 1418 - DNA, 21 bp, Artificial Sequence
  Description of Artificial Sequence: Synthetic oligonucleotide
gccggtggagccgccgccgga

SEQ ID NO: 1419 - DNA, 21 bp, Artificial Sequence
  Description of Artificial Sequence: Synthetic oligonucleotide
tgggcaagggcggctttgcca

SEQ ID NO: 1420 - DNA, 21 bp, Artificial Sequence
  Description of Artificial Sequence: Synthetic oligonucleotide
gggcaagggcggctttgccaa

SEQ ID NO: 1421 - DNA, 21 bp, Artificial Sequence
  Description of Artificial Sequence: Synthetic oligonucleotide
ggcaagggcggctttgccaag

SEQ ID NO: 1422 - DNA, 21 bp, Artificial Sequence
  Description of Artificial Sequence: Synthetic oligonucleotide
ccaagtgcttcgagatctcgg

SEQ ID NO: 1423 - DNA, 21 bp, Artificial Sequence
  Description of Artificial Sequence: Synthetic oligonucleotide
catggacatcttctccctctg

SEQ ID NO: 1424 - DNA, 21 bp, Artificial Sequence
  Description of Artificial Sequence: Synthetic oligonucleotide
tcgaggacaacgacttcgtgt

SEQ ID NO: 1425 - DNA, 21 bp, Artificial Sequence
  Description of Artificial Sequence: Synthetic oligonucleotide
cgaggacaacgacttcgtgtt

SEQ ID NO: 1426 - DNA, 21 bp, Artificial Sequence
  Description of Artificial Sequence: Synthetic oligonucleotide
gaggacaacgacttcgtgttc

SEQ ID NO: 1427 - DNA, 21 bp, Artificial Sequence
  Description of Artificial Sequence: Synthetic oligonucleotide
cagttaaaaaccaccacaaca

SEQ ID NO: 1428 - DNA, 21 bp, Artificial Sequence
  Description of Artificial Sequence: Synthetic oligonucleotide
gctgaatggccgggaggagga

SEQ ID NO: 1429 - DNA, 21 bp, Artificial Sequence
  Description of Artificial Sequence: Synthetic oligonucleotide
tggagtggcagatgggagagc

SEQ ID NO: 1430 - DNA, 21 bp, Artificial Sequence
  Description of Artificial Sequence: Synthetic oligonucleotide
aaccatgagggaaatcgtgca

SEQ ID NO: 1431 - DNA, 21 bp, Artificial Sequence
  Description of Artificial Sequence: Synthetic oligonucleotide
accatgagggaaatcgtgcac

SEQ ID NO: 1432 - DNA, 21 bp, Artificial Sequence
  Description of Artificial Sequence: Synthetic oligonucleotide
ttctctgtaggtggcaaatat

SEQ ID NO: 1433 - DNA, 21 bp, Artificial Sequence
  Description of Artificial Sequence: Synthetic oligonucleotide
cggaggctccttaccgatgtt

SEQ ID NO: 1434 - DNA, 21 bp, Artificial Sequence
  Description of Artificial Sequence: Synthetic oligonucleotide
caggtgaaattcctgagatgt

SEQ ID NO: 1435 - DNA, 21 bp, Artificial Sequence
  Description of Artificial Sequence: Synthetic oligonucleotide
gacatcattgaccagagctct

SEQ ID NO: 1436 - DNA, 21 bp, Artificial Sequence
  Description of Artificial Sequence: Synthetic oligonucleotide
gggaaaagctgcaagaaataa

SEQ ID NO: 1437 - DNA, 21 bp, Artificial Sequence
  Description of Artificial Sequence: Synthetic oligonucleotide
ggtaggcaaaggagacatctt

SEQ ID NO: 1438 - DNA, 21 bp, Artificial Sequence
  Description of Artificial Sequence: Synthetic oligonucleotide
gaagaagtcttcaagaaaata

SEQ ID NO: 1439 - DNA, 21 bp, Artificial Sequence
  Description of Artificial Sequence: Synthetic oligonucleotide
tctgaggagcccacagccttc

SEQ ID NO: 1440 - DNA, 21 bp, Artificial Sequence
  Description of Artificial Sequence: Synthetic oligonucleotide
aggagaaacctgtctggttct

SEQ ID NO: 1441 - DNA, 21 bp, Artificial Sequence
  Description of Artificial Sequence: Synthetic oligonucleotide
gagtgaaggtatcggctgagc

SEQ ID NO: 1442 - DNA, 21 bp, Artificial Sequence
  Description of Artificial Sequence: Synthetic oligonucleotide
cctacccaaaccgcccagatg

SEQ ID NO: 1443 - DNA, 21 bp, Artificial Sequence
  Description of Artificial Sequence: Synthetic oligonucleotide
cttctgcccaagaaggtggga

SEQ ID NO: 1444 - DNA, 21 bp, Artificial Sequence
  Description of Artificial Sequence: Synthetic oligonucleotide
aggtatgctgctgaaagtggg

SEQ ID NO: 1445 - DNA, 21 bp, Artificial Sequence
  Description of Artificial Sequence: Synthetic oligonucleotide
agcccccagacctggctatgg

SEQ ID NO: 1446 - DNA, 21 bp, Artificial Sequence
  Description of Artificial Sequence: Synthetic oligonucleotide
aaggaagccagttactcatca

SEQ ID NO: 1447 - DNA, 21 bp, Artificial Sequence
  Description of Artificial Sequence: Synthetic oligonucleotide
gcagcccccacagccctccca

SEQ ID NO: 1448 - DNA, 21 bp, Artificial Sequence
  Description of Artificial Sequence: Synthetic oligonucleotide
cagaccctggtatacatatat

SEQ ID NO: 1449 - DNA, 21 bp, Artificial Sequence
  Description of Artificial Sequence: Synthetic oligonucleotide
gctgtcggtccatgtaggaga

SEQ ID NO: 1450 - DNA, 21 bp, Artificial Sequence
  Description of Artificial Sequence: Synthetic oligonucleotide
tcctacatggaccgacagcca

SEQ ID NO: 1451 - DNA, 21 bp, Artificial Sequence
  Description of Artificial Sequence: Synthetic oligonucleotide
aggtgagacattaatccctca

SEQ ID NO: 1452 - DNA, 21 bp, Artificial Sequence
  Description of Artificial Sequence: Synthetic oligonucleotide
atccagcagcacctgtccccc

SEQ ID NO: 1453 - DNA, 21 bp, Artificial Sequence
  Description of Artificial Sequence: Synthetic oligonucleotide
acaaccccctgcagagtggtg

SEQ ID NO: 1454 - DNA, 21 bp, Artificial Sequence
  Description of Artificial Sequence: Synthetic oligonucleotide
agttgggcaggagcctgtgct

SEQ ID NO: 1455 - DNA, 21 bp, Artificial Sequence
  Description of Artificial Sequence: Synthetic oligonucleotide
tagaagatacctgtgtatatt

SEQ ID NO: 1456 - DNA, 21 bp, Artificial Sequence
  Description of Artificial Sequence: Synthetic oligonucleotide
cccacagctgtctacctgtcc

SEQ ID NO: 1457 - DNA, 21 bp, Artificial Sequence
  Description of Artificial Sequence: Synthetic oligonucleotide
cccagaaccccccaaagtgtc

SEQ ID NO: 1458 - DNA, 21 bp, Artificial Sequence
  Description of Artificial Sequence: Synthetic oligonucleotide
aggagggcacctatctggcca

SEQ ID NO: 1459 - DNA, 21 bp, Artificial Sequence
  Description of Artificial Sequence: Synthetic oligonucleotide
cctacatgccccccacctccg

SEQ ID NO: 1460 - DNA, 21 bp, Artificial Sequence
  Description of Artificial Sequence: Synthetic oligonucleotide
ggctagagtggcgacgccagc

SEQ ID NO: 1461 - DNA, 21 bp, Artificial Sequence
  Description of Artificial Sequence: Synthetic oligonucleotide
cgctcgcatcctccacgaacc

SEQ ID NO: 1462 - DNA, 21 bp, Artificial Sequence
  Description of Artificial Sequence: Synthetic oligonucleotide
gcagaggcggggagaggcacg

SEQ ID NO: 1463 - DNA, 21 bp, Artificial Sequence
  Description of Artificial Sequence: Synthetic oligonucleotide
ctgtctgcctttcttctgctt

SEQ ID NO: 1464 - DNA, 21 bp, Artificial Sequence
  Description of Artificial Sequence: Synthetic oligonucleotide
gtcctctttccccagaacccc

SEQ ID NO: 1465 - DNA, 21 bp, Artificial Sequence
  Description of Artificial Sequence: Synthetic oligonucleotide
agggccctcccttgaggacag

SEQ ID NO: 1466 - DNA, 21 bp, Artificial Sequence
  Description of Artificial Sequence: Synthetic oligonucleotide
ttcgtggccaatgccataatc

SEQ ID NO: 1467 - DNA, 21 bp, Artificial Sequence
  Description of Artificial Sequence: Synthetic oligonucleotide
tcctgagagtccagtttgtat

SEQ ID NO: 1468 - DNA, 21 bp, Artificial Sequence
  Description of Artificial Sequence: Synthetic oligonucleotide
ggagaaactcacctgacctcc

SEQ ID NO: 1469 - DNA, 21 bp, Artificial Sequence
  Description of Artificial Sequence: Synthetic oligonucleotide
acctgaggatccctttcccag

SEQ ID NO: 1470 - DNA, 21 bp, Artificial Sequence
  Description of Artificial Sequence: Synthetic oligonucleotide
cctcaggatagaactggagga

SEQ ID NO: 1471 - DNA, 21 bp, Artificial Sequence
  Description of Artificial Sequence: Synthetic oligonucleotide
gctgctgcaaatgtggtgaga

SEQ ID NO: 1472 - DNA, 21 bp, Artificial Sequence
  Description of Artificial Sequence: Synthetic oligonucleotide
ccaggtatatggaaccctggg

SEQ ID NO: 1473 - DNA, 21 bp, Artificial Sequence
  Description of Artificial Sequence: Synthetic oligonucleotide
gcagttcattgcccaagatga

SEQ ID NO: 1474 - DNA, 21 bp, Artificial Sequence
  Description of Artificial Sequence: Synthetic oligonucleotide
tcaccacatttgcagcagcca

SEQ ID NO: 1475 - DNA, 21 bp, Artificial Sequence
  Description of Artificial Sequence: Synthetic oligonucleotide
acgggggcgttgtgatgggtt

SEQ ID NO: 1476 - DNA, 21 bp, Artificial Sequence
  Description of Artificial Sequence: Synthetic oligonucleotide
tctatggttatgtggatgcag

SEQ ID NO: 1477 - DNA, 21 bp, Artificial Sequence
  Description of Artificial Sequence: Synthetic oligonucleotide
ctcaccctgcagacactcggg

SEQ ID NO: 1478 - DNA, 21 bp, Artificial Sequence
  Description of Artificial Sequence: Synthetic oligonucleotide
ctgagagccgagtcccatgtt

SEQ ID NO: 1479 - DNA, 21 bp, Artificial Sequence
  Description of Artificial Sequence: Synthetic oligonucleotide
tctatgcgatctccagagctc

SEQ ID NO: 1480 - DNA, 21 bp, Artificial Sequence
  Description of Artificial Sequence: Synthetic oligonucleotide
tcttatcagcccacagaattc

SEQ ID NO: 1481 - DNA, 21 bp, Artificial Sequence
  Description of Artificial Sequence: Synthetic oligonucleotide
tccacagtgtaccacatgaag

SEQ ID NO: 1482 - DNA, 21 bp, Artificial Sequence
  Description of Artificial Sequence: Synthetic oligonucleotide
atcttatagggtcctggactc

SEQ ID NO: 1483 - DNA, 21 bp, Artificial Sequence
  Description of Artificial Sequence: Synthetic oligonucleotide
acccaaccatcttccttcatg

SEQ ID NO: 1484 - DNA, 21 bp, Artificial Sequence
  Description of Artificial Sequence: Synthetic oligonucleotide
agtgtcggcagcctccaagct

SEQ ID NO: 1485 - DNA, 21 bp, Artificial Sequence
  Description of Artificial Sequence: Synthetic oligonucleotide
tactttcacccaaccatcttc

SEQ ID NO: 1486 - DNA, 21 bp, Artificial Sequence
  Description of Artificial Sequence: Synthetic oligonucleotide
tcatttgtccacagtgtacca

SEQ ID NO: 1487 - DNA, 21 bp, Artificial Sequence
  Description of Artificial Sequence: Synthetic oligonucleotide
tccgtccccacccagggactg

SEQ ID NO: 1488 - DNA, 21 bp, Artificial Sequence
  Description of Artificial Sequence: Synthetic oligonucleotide
gcatcacttgctgtatcctct

SEQ ID NO: 1489 - DNA, 21 bp, Artificial Sequence
  Description of Artificial Sequence: Synthetic oligonucleotide
gtacttacactctcagaaccc

SEQ ID NO: 1490 - DNA, 21 bp, Artificial Sequence
  Description of Artificial Sequence: Synthetic oligonucleotide
gatgaccgttcccgaggtgca

SEQ ID NO: 1491 - DNA, 21 bp, Artificial Sequence
  Description of Artificial Sequence: Synthetic oligonucleotide
tgtagctcagagccaagtaca

SEQ ID NO: 1492 - DNA, 21 bp, Artificial Sequence
  Description of Artificial Sequence: Synthetic oligonucleotide
gtacctctgcagaagaggacg

SEQ ID NO: 1493 - DNA, 21 bp, Artificial Sequence
  Description of Artificial Sequence: Synthetic oligonucleotide
aggatccgctctgcccagtca

SEQ ID NO: 1494 - DNA, 21 bp, Artificial Sequence
  Description of Artificial Sequence: Synthetic oligonucleotide
gctggtggagcctgcccactg

SEQ ID NO: 1495 - DNA, 21 bp, Artificial Sequence
  Description of Artificial Sequence: Synthetic oligonucleotide
acttgcatcagatattgctac

SEQ ID NO: 1496 - DNA, 21 bp, Artificial Sequence
  Description of Artificial Sequence: Synthetic oligonucleotide
gcaagatcatcagagagatct

SEQ ID NO: 1497 - DNA, 21 bp, Artificial Sequence
  Description of Artificial Sequence: Synthetic oligonucleotide
gcttctgctgcccttgatgac

SEQ ID NO: 1498 - DNA, 21 bp, Artificial Sequence
  Description of Artificial Sequence: Synthetic oligonucleotide
gaacaagtgttaaatcaaaaa

SEQ ID NO: 1499 - DNA, 21 bp, Artificial Sequence
  Description of Artificial Sequence: Synthetic oligonucleotide
gggatcgtcctgcaagaccta

SEQ ID NO: 1500 - DNA, 21 bp, Artificial Sequence
  Description of Artificial Sequence: Synthetic oligonucleotide
gagcaaagacaacagcagttt

SEQ ID NO: 1501 - DNA, 21 bp, Artificial Sequence
  Description of Artificial Sequence: Synthetic oligonucleotide
tgtaaaaattgcactacttct

SEQ ID NO: 1502 - DNA, 21 bp, Artificial Sequence
  Description of Artificial Sequence: Synthetic oligonucleotide
cagaaacagcaacagctatta

SEQ ID NO: 1503 - DNA, 21 bp, Artificial Sequence
  Description of Artificial Sequence: Synthetic oligonucleotide
gaggatctagaggacgaggag

SEQ ID NO: 1504 - DNA, 21 bp, Artificial Sequence
  Description of Artificial Sequence: Synthetic oligonucleotide
acaatggagagtatgttatct

SEQ ID NO: 1505 - DNA, 21 bp, Artificial Sequence
  Description of Artificial Sequence: Synthetic oligonucleotide
ccgcgctgccagtcgaggcag

SEQ ID NO: 1506 - DNA, 21 bp, Artificial Sequence
  Description of Artificial Sequence: Synthetic oligonucleotide
taagtcgttactaagaagtcc

SEQ ID NO: 1507 - DNA, 21 bp, Artificial Sequence
  Description of Artificial Sequence: Synthetic oligonucleotide
tacttgtccttgtacatcttg

SEQ ID NO: 1508 - DNA, 21 bp, Artificial Sequence
  Description of Artificial Sequence: Synthetic oligonucleotide
tcctgcccctacccacgacag

SEQ ID NO: 1509 - DNA, 21 bp, Artificial Sequence
  Description of Artificial Sequence: Synthetic oligonucleotide
cctgccccatctcagtgcaac

SEQ ID NO: 1510 - DNA, 21 bp, Artificial Sequence
  Description of Artificial Sequence: Synthetic oligonucleotide
gagagattgagaccgttcgct

SEQ ID NO: 1511 - DNA, 21 bp, Artificial Sequence
  Description of Artificial Sequence: Synthetic oligonucleotide
cctgcacccctgagcctgtga

SEQ ID NO: 1512 - DNA, 21 bp, Artificial Sequence
  Description of Artificial Sequence: Synthetic oligonucleotide
cccatggagcttacccagcct

SEQ ID NO: 1513 - DNA, 21 bp, Artificial Sequence
  Description of Artificial Sequence: Synthetic oligonucleotide
acgtggttcccgcgcacagcg

SEQ ID NO: 1514 - DNA, 21 bp, Artificial Sequence
  Description of Artificial Sequence: Synthetic oligonucleotide
ccagcaggcagctccctgaag

SEQ ID NO: 1515 - DNA, 21 bp, Artificial Sequence
  Description of Artificial Sequence: Synthetic oligonucleotide
cggtatcccagggccacggca

SEQ ID NO: 1516 - DNA, 21 bp, Artificial Sequence
  Description of Artificial Sequence: Synthetic oligonucleotide
ccaggatgtgggggtcggcac

SEQ ID NO: 1517 - DNA, 21 bp, Artificial Sequence
  Description of Artificial Sequence: Synthetic oligonucleotide
cagcccgaggcgctgacctca

SEQ ID NO: 1518 - DNA, 21 bp, Artificial Sequence
  Description of Artificial Sequence: Synthetic oligonucleotide
cctctcgactggcgaactcca

SEQ ID NO: 1519 - DNA, 21 bp, Artificial Sequence
  Description of Artificial Sequence: Synthetic oligonucleotide
gcttctgcatcacaagtcaga

SEQ ID NO: 1520 - DNA, 21 bp, Artificial Sequence
  Description of Artificial Sequence: Synthetic oligonucleotide
gttcaatgcagttctgacaca

SEQ ID NO: 1521 - DNA, 21 bp, Artificial Sequence
  Description of Artificial Sequence: Synthetic oligonucleotide
ccggaggacagagactgacat

SEQ ID NO: 1522 - DNA, 21 bp, Artificial Sequence
  Description of Artificial Sequence: Synthetic oligonucleotide
cctacagtgtgtcagaactgc

SEQ ID NO: 1523 - DNA, 21 bp, Artificial Sequence
  Description of Artificial Sequence: Synthetic oligonucleotide
aagatgggaagatgatcggct

SEQ ID NO: 1524 - DNA, 21 bp, Artificial Sequence
  Description of Artificial Sequence: Synthetic oligonucleotide
cttgaaggtggctgtactggt

SEQ ID NO: 1525 - DNA, 21 bp, Artificial Sequence
  Description of Artificial Sequence: Synthetic oligonucleotide
cactgatacatccctcgaggg

SEQ ID NO: 1526 - DNA, 21 bp, Artificial Sequence
  Description of Artificial Sequence: Synthetic oligonucleotide
tcttcagttaggaagccgatc

SEQ ID NO: 1527 - DNA, 21 bp, Artificial Sequence
  Description of Artificial Sequence: Synthetic oligonucleotide
caggtactttggcccagtcaa

SEQ ID NO: 1528 - DNA, 21 bp, Artificial Sequence
  Description of Artificial Sequence: Synthetic oligonucleotide
gcctgctggatcccaaactct

SEQ ID NO: 1529 - DNA, 21 bp, Artificial Sequence
  Description of Artificial Sequence: Synthetic oligonucleotide
gaggcagctgctacagagatg

SEQ ID NO: 1530 - DNA, 21 bp, Artificial Sequence
  Description of Artificial Sequence: Synthetic oligonucleotide
ctctgatcttaacagttccgc

SEQ ID NO: 1531 - DNA, 21 bp, Artificial Sequence
  Description of Artificial Sequence: Synthetic oligonucleotide
gaagctcatagattcgacatt

SEQ ID NO: 1532 - DNA, 21 bp, Artificial Sequence
  Description of Artificial Sequence: Synthetic oligonucleotide
aggggccaccttctctgtagg

SEQ ID NO: 1533 - DNA, 21 bp, Artificial Sequence
  Description of Artificial Sequence: Synthetic oligonucleotide
agggggtagagccactatact

SEQ ID NO: 1534 - DNA, 21 bp, Artificial Sequence
  Description of Artificial Sequence: Synthetic oligonucleotide
caggcctctactacgtggaca

SEQ ID NO: 1535 - DNA, 21 bp, Artificial Sequence
  Description of Artificial Sequence: Synthetic oligonucleotide
ggacttgggggtcgtgcagat

SEQ ID NO: 1536 - DNA, 21 bp, Artificial Sequence
  Description of Artificial Sequence: Synthetic oligonucleotide
tgcccacactagacatggcgc

SEQ ID NO: 1537 - DNA, 21 bp, Artificial Sequence
  Description of Artificial Sequence: Synthetic oligonucleotide
gattcctggctcttctgggac

SEQ ID NO: 1538 - DNA, 21 bp, Artificial Sequence
  Description of Artificial Sequence: Synthetic oligonucleotide
tactgatacaccatgttggca

SEQ ID NO: 1539 - DNA, 21 bp, Artificial Sequence
  Description of Artificial Sequence: Synthetic oligonucleotide
tgggtggatccaagtgccctt

SEQ ID NO: 1540 - DNA, 21 bp, Artificial Sequence
  Description of Artificial Sequence: Synthetic oligonucleotide
gaccagacagacatgcacgga

SEQ ID NO: 1541 - DNA, 21 bp, Artificial Sequence
  Description of Artificial Sequence: Synthetic oligonucleotide
cacacctgtacacactgattg

SEQ ID NO: 1542 - DNA, 21 bp, Artificial Sequence
  Description of Artificial Sequence: Synthetic oligonucleotide
ctaatagtttggaccagacag

SEQ ID NO: 1543 - DNA, 21 bp, Artificial Sequence
  Description of Artificial Sequence: Synthetic oligonucleotide
gattcgatccagcgggaagtc

SEQ ID NO: 1544 - DNA, 21 bp, Artificial Sequence
  Description of Artificial Sequence: Synthetic oligonucleotide
ctccaagtctcacctgccaga

SEQ ID NO: 1545 - DNA, 21 bp, Artificial Sequence
  Description of Artificial Sequence: Synthetic oligonucleotide
cagacaagccaggatgcacgc

SEQ ID NO: 1546 - DNA, 21 bp, Artificial Sequence
  Description of Artificial Sequence: Synthetic oligonucleotide
accgtgaactgcaccaccagc

SEQ ID NO: 1547 - DNA, 21 bp, Artificial Sequence
  Description of Artificial Sequence: Synthetic oligonucleotide
ccaccacccccaggcacacct

SEQ ID NO: 1548 - DNA, 21 bp, Artificial Sequence
  Description of Artificial Sequence: Synthetic oligonucleotide
aagcatcaggatcctttatct

SEQ ID NO: 1549 - DNA, 21 bp, Artificial Sequence
  Description of Artificial Sequence: Synthetic oligonucleotide
cagtctgtgtactcacactca

SEQ ID NO: 1550 - DNA, 21 bp, Artificial Sequence
  Description of Artificial Sequence: Synthetic oligonucleotide
acaactactatggggcagaca

SEQ ID NO: 1551 - DNA, 21 bp, Artificial Sequence
  Description of Artificial Sequence: Synthetic oligonucleotide
ccctgtgctggatgccctacc

SEQ ID NO: 1552 - DNA, 21 bp, Artificial Sequence
  Description of Artificial Sequence: Synthetic oligonucleotide
tcgtgcatctgttctccaccc

SEQ ID NO: 1553 - DNA, 21 bp, Artificial Sequence
  Description of Artificial Sequence: Synthetic oligonucleotide
ggagcagccgggagaagaggc

SEQ ID NO: 1554 - DNA, 21 bp, Artificial Sequence
  Description of Artificial Sequence: Synthetic oligonucleotide
gacccccgcttccgccaggcc

SEQ ID NO: 1555 - DNA, 21 bp, Artificial Sequence
  Description of Artificial Sequence: Synthetic oligonucleotide
ggcgatgaagaagtaacaggt

SEQ ID NO: 1556 - DNA, 21 bp, Artificial Sequence
  Description of Artificial Sequence: Synthetic oligonucleotide
acctcttcctcatgaacatct

SEQ ID NO: 1557 - DNA, 21 bp, Artificial Sequence
  Description of Artificial Sequence: Synthetic oligonucleotide
ggaccttcttctgcaagctca

SEQ ID NO: 1558 - DNA, 21 bp, Artificial Sequence
  Description of Artificial Sequence: Synthetic oligonucleotide
tggtgcccttcaccatcatgc

SEQ ID NO: 1559 - DNA, 21 bp, Artificial Sequence
  Description of Artificial Sequence: Synthetic oligonucleotide
catggggatggggaatacaag

SEQ ID NO: 1560 - DNA, 21 bp, Artificial Sequence
  Description of Artificial Sequence: Synthetic oligonucleotide
acttagctccagctgcagaaa

SEQ ID NO: 1561 - DNA, 21 bp, Artificial Sequence
  Description of Artificial Sequence: Synthetic oligonucleotide
ggtcatcaccagtggtccttt

SEQ ID NO: 1562 - DNA, 21 bp, Artificial Sequence
  Description of Artificial Sequence: Synthetic oligonucleotide
cgtggatcagacactgcgaga

SEQ ID NO: 1563 - DNA, 21 bp, Artificial Sequence
  Description of Artificial Sequence: Synthetic oligonucleotide
caaatgcctccatttcactta

SEQ ID NO: 1564 - DNA, 21 bp, Artificial Sequence
  Description of Artificial Sequence: Synthetic oligonucleotide
taaaccaacacaagtccaact

SEQ ID NO: 1565 - DNA, 21 bp, Artificial Sequence
  Description of Artificial Sequence: Synthetic oligonucleotide
gcctggttccaaaggtcttgt

SEQ ID NO: 1566 - DNA, 21 bp, Artificial Sequence
  Description of Artificial Sequence: Synthetic oligonucleotide
tccacccaccctctccatagg

SEQ ID NO: 1567 - DNA, 21 bp, Artificial Sequence
  Description of Artificial Sequence: Synthetic oligonucleotide
cactgtccacttccctaggtg

SEQ ID NO: 1568 - DNA, 21 bp, Artificial Sequence
  Description of Artificial Sequence: Synthetic oligonucleotide
tgcagctggagctaagtgaaa

SEQ ID NO: 1569 - DNA, 21 bp, Artificial Sequence
  Description of Artificial Sequence: Synthetic oligonucleotide
ggtattctgaaatgtgacaga

SEQ ID NO: 1570 - DNA, 21 bp, Artificial Sequence
  Description of Artificial Sequence: Synthetic oligonucleotide
aaggcacattgcttggtacat

SEQ ID NO: 1571 - DNA, 21 bp, Artificial Sequence
  Description of Artificial Sequence: Synthetic oligonucleotide
ccaacaaatatatggtgttgt

SEQ ID NO: 1572 - DNA, 21 bp, Artificial Sequence
  Description of Artificial Sequence: Synthetic oligonucleotide
cattgctccataggacaatcc

SEQ ID NO: 1573 - DNA, 21 bp, Artificial Sequence
  Description of Artificial Sequence: Synthetic oligonucleotide
agatggaaaatgatcttccac

SEQ ID NO: 1574 - DNA, 21 bp, Artificial Sequence
  Description of Artificial Sequence: Synthetic oligonucleotide
aaagatgagaaagctctgaat

SEQ ID NO: 1575 - DNA, 21 bp, Artificial Sequence
  Description of Artificial Sequence: Synthetic oligonucleotide
taggtcattcaagacacagat

SEQ ID NO: 1576 - DNA, 21 bp, Artificial Sequence
  Description of Artificial Sequence: Synthetic oligonucleotide
cagagtctcttccatctccca

SEQ ID NO: 1577 - DNA, 21 bp, Artificial Sequence
  Description of Artificial Sequence: Synthetic oligonucleotide
aaagaggtcctatggaaaaaa

SEQ ID NO: 1578 - DNA, 21 bp, Artificial Sequence
  Description of Artificial Sequence: Synthetic oligonucleotide
gcgattccatttcatactcat

SEQ ID NO: 1579 - DNA, 21 bp, Artificial Sequence
  Description of Artificial Sequence: Synthetic oligonucleotide
agaggggtcatcgatgctcac

SEQ ID NO: 1580 - DNA, 21 bp, Artificial Sequence
  Description of Artificial Sequence: Synthetic oligonucleotide
ggtgacaaaggaccaatggga

SEQ ID NO: 1581 - DNA, 21 bp, Artificial Sequence
  Description of Artificial Sequence: Synthetic oligonucleotide
gcatagccattgctggtcccg

SEQ ID NO: 1582 - DNA, 21 bp, Artificial Sequence
  Description of Artificial Sequence: Synthetic oligonucleotide
cagtgtcaggcacctacgatg

SEQ ID NO: 1583 - DNA, 21 bp, Artificial Sequence
  Description of Artificial Sequence: Synthetic oligonucleotide
atgccggctctactgtacctt

SEQ ID NO: 1584 - DNA, 21 bp, Artificial Sequence
  Description of Artificial Sequence: Synthetic oligonucleotide
aggtgacatgggaagtccagg

SEQ ID NO: 1585 - DNA, 21 bp, Artificial Sequence
  Description of Artificial Sequence: Synthetic oligonucleotide
tagttgtcactgaaacagtaa

SEQ ID NO: 1586 - DNA, 21 bp, Artificial Sequence
  Description of Artificial Sequence: Synthetic oligonucleotide
caagaagcagcaaactgacct

SEQ ID NO: 1587 - DNA, 21 bp, Artificial Sequence
  Description of Artificial Sequence: Synthetic oligonucleotide
ctgttccatcattagcttctt

SEQ ID NO: 1588 - DNA, 21 bp, Artificial Sequence
  Description of Artificial Sequence: Synthetic oligonucleotide
actccgtcctctggttgaaga

SEQ ID NO: 1589 - DNA, 21 bp, Artificial Sequence
  Description of Artificial Sequence: Synthetic oligonucleotide
cttccaggtataaattcatta

SEQ ID NO: 1590 - DNA, 21 bp, Artificial Sequence
  Description of Artificial Sequence: Synthetic oligonucleotide
cctgccagcactggatcccaa

SEQ ID NO: 1591 - DNA, 21 bp, Artificial Sequence
  Description of Artificial Sequence: Synthetic oligonucleotide
ctttgacacagcactccagct

SEQ ID NO: 1592 - DNA, 21 bp, Artificial Sequence
  Description of Artificial Sequence: Synthetic oligonucleotide
actctcatagcattcaagtct

SEQ ID NO: 1593 - DNA, 21 bp, Artificial Sequence
  Description of Artificial Sequence: Synthetic oligonucleotide
ctttgggatccagtgctggca

SEQ ID NO: 1594 - DNA, 21 bp, Artificial Sequence
  Description of Artificial Sequence: Synthetic oligonucleotide
agctggagtgctgtgtcaaag

SEQ ID NO: 1595 - DNA, 21 bp, Artificial Sequence
  Description of Artificial Sequence: Synthetic oligonucleotide
ttatgtcagggtgcaggattt

SEQ ID NO: 1596 - DNA, 21 bp, Artificial Sequence
  Description of Artificial Sequence: Synthetic oligonucleotide
acacagcactccagctgaaac

SEQ ID NO: 1597 - DNA, 21 bp, Artificial Sequence
  Description of Artificial Sequence: Synthetic oligonucleotide
tagcatttcttgtgcatttct

SEQ ID NO: 1598 - DNA, 21 bp, Artificial Sequence
  Description of Artificial Sequence: Synthetic oligonucleotide
ttgtgcatttctgatgataat

SEQ ID NO: 1599 - DNA, 21 bp, Artificial Sequence
  Description of Artificial Sequence: Synthetic oligonucleotide
atagagcaacttgtgattgga

SEQ ID NO: 1600 - DNA, 21 bp, Artificial Sequence
  Description of Artificial Sequence: Synthetic oligonucleotide
atgtgatgactttaatcagta

SEQ ID NO: 1601 - DNA, 21 bp, Artificial Sequence
  Description of Artificial Sequence: Synthetic oligonucleotide
gaggtggccacattaaagatg

SEQ ID NO: 1602 - DNA, 21 bp, Artificial Sequence
  Description of Artificial Sequence: Synthetic oligonucleotide
tgaagaagtacatcccaagca

SEQ ID NO: 1603 - DNA, 21 bp, Artificial Sequence
  Description of Artificial Sequence: Synthetic oligonucleotide
aaataggtgggctacctttct

SEQ ID NO: 1604 - DNA, 21 bp, Artificial Sequence
  Description of Artificial Sequence: Synthetic oligonucleotide
atgtggccacctccaaattcc

SEQ ID NO: 1605 - DNA, 21 bp, Artificial Sequence
  Description of Artificial Sequence: Synthetic oligonucleotide
atctgtcgtagttcttcctca

SEQ ID NO: 1606 - DNA, 21 bp, Artificial Sequence
  Description of Artificial Sequence: Synthetic oligonucleotide
cccctgttggaggacaaacaa

SEQ ID NO: 1607 - DNA, 21 bp, Artificial Sequence
  Description of Artificial Sequence: Synthetic oligonucleotide
cacagcaagtgaagatgttaa

SEQ ID NO: 1608 - DNA, 21 bp, Artificial Sequence
  Description of Artificial Sequence: Synthetic oligonucleotide
cagatcgagatagacaatggg

SEQ ID NO: 1609 - DNA, 21 bp, Artificial Sequence
  Description of Artificial Sequence: Synthetic oligonucleotide
gtcttctacaataccaacagc

SEQ ID NO: 1610 - DNA, 21 bp, Artificial Sequence
  Description of Artificial Sequence: Synthetic oligonucleotide
tcataagcaggtggagcattg

SEQ ID NO: 1611 - DNA, 21 bp, Artificial Sequence
  Description of Artificial Sequence: Synthetic oligonucleotide
ctgtcccgatgatcaaaccct

SEQ ID NO: 1612 - DNA, 21 bp, Artificial Sequence
  Description of Artificial Sequence: Synthetic oligonucleotide
ccaaccatcaaggctctgtat

SEQ ID NO: 1613 - DNA, 21 bp, Artificial Sequence
  Description of Artificial Sequence: Synthetic oligonucleotide
tcttgaagagacactttgctg

SEQ ID NO: 1614 - DNA, 21 bp, Artificial Sequence
  Description of Artificial Sequence: Synthetic oligonucleotide
aggataaaagtcttcatgttg

SEQ ID NO: 1615 - DNA, 21 bp, Artificial Sequence
  Description of Artificial Sequence: Synthetic oligonucleotide
aacttactcttcagccgtggt

SEQ ID NO: 1616 - DNA, 21 bp, Artificial Sequence
  Description of Artificial Sequence: Synthetic oligonucleotide
catttcaggataaaagtcttc

SEQ ID NO: 1617 - DNA, 21 bp, Artificial Sequence
  Description of Artificial Sequence: Synthetic oligonucleotide
tctatctcttgggccagggcc

SEQ ID NO: 1618 - DNA, 21 bp, Artificial Sequence
  Description of Artificial Sequence: Synthetic oligonucleotide
atcatcgggacagcaaagtgt

SEQ ID NO: 1619 - DNA, 21 bp, Artificial Sequence
  Description of Artificial Sequence: Synthetic oligonucleotide
ggttatcatggtaccgatgct

SEQ ID NO: 1620 - DNA, 21 bp, Artificial Sequence
  Description of Artificial Sequence: Synthetic oligonucleotide
agatatacagcatcggtacca

SEQ ID NO: 1621 - DNA, 21 bp, Artificial Sequence
  Description of Artificial Sequence: Synthetic oligonucleotide
tcaatgtgatggcaccaccat

SEQ ID NO: 1622 - DNA, 21 bp, Artificial Sequence
  Description of Artificial Sequence: Synthetic oligonucleotide
actactctgaccatcagccct

SEQ ID NO: 1623 - DNA, 21 bp, Artificial Sequence
  Description of Artificial Sequence: Synthetic oligonucleotide
gggccgggacagtgtcgtata

SEQ ID NO: 1624 - DNA, 21 bp, Artificial Sequence
  Description of Artificial Sequence: Synthetic oligonucleotide
gcatccacaccaggtggtgag

SEQ ID NO: 1625 - DNA, 21 bp, Artificial Sequence
  Description of Artificial Sequence: Synthetic oligonucleotide
ctggcgccgttgacgcgcacg

SEQ ID NO: 1626 - DNA, 21 bp, Artificial Sequence
  Description of Artificial Sequence: Synthetic oligonucleotide
atgtggctgagttggaccagt

SEQ ID NO: 1627 - DNA, 21 bp, Artificial Sequence
  Description of Artificial Sequence: Synthetic oligonucleotide
ttgtgctgcatacggagccgc

SEQ ID NO: 1628 - DNA, 21 bp, Artificial Sequence
  Description of Artificial Sequence: Synthetic oligonucleotide
gcaccagaggacccaccacgt

SEQ ID NO: 1629 - DNA, 21 bp, Artificial Sequence
  Description of Artificial Sequence: Synthetic oligonucleotide
atgcaggttctgccattacag

SEQ ID NO: 1630 - DNA, 21 bp, Artificial Sequence
  Description of Artificial Sequence: Synthetic oligonucleotide
aagataatgcaggagtcatag

SEQ ID NO: 1631 - DNA, 21 bp, Artificial Sequence
  Description of Artificial Sequence: Synthetic oligonucleotide
taggagccaaaaacctgtata

SEQ ID NO: 1632 - DNA, 21 bp, Artificial Sequence
  Description of Artificial Sequence: Synthetic oligonucleotide
ccttccctttatatccacagg

SEQ ID NO: 1633 - DNA, 21 bp, Artificial Sequence
  Description of Artificial Sequence: Synthetic oligonucleotide
ctacctttcatctcgccttta

SEQ ID NO: 1634 - DNA, 21 bp, Artificial Sequence
  Description of Artificial Sequence: Synthetic oligonucleotide
caaatatactggagaatcatg

SEQ ID NO: 1635 - DNA, 21 bp, Artificial Sequence
  Description of Artificial Sequence: Synthetic oligonucleotide
ttctctcagtacatccagcag

SEQ ID NO: 1636 - DNA, 21 bp, Artificial Sequence
  Description of Artificial Sequence: Synthetic oligonucleotide
gttgtcgaatgaccactgctg

SEQ ID NO: 1637 - DNA, 21 bp, Artificial Sequence
  Description of Artificial Sequence: Synthetic oligonucleotide
tatccacaggacgtggtgggt

SEQ ID NO: 1638 - DNA, 21 bp, Artificial Sequence
  Description of Artificial Sequence: Synthetic oligonucleotide
attaccaggtaccatgcagag

SEQ ID NO: 1639 - DNA, 21 bp, Artificial Sequence
  Description of Artificial Sequence: Synthetic oligonucleotide
gctgtggcattagctctgaat

SEQ ID NO: 1640 - DNA, 21 bp, Artificial Sequence
  Description of Artificial Sequence: Synthetic oligonucleotide
cctgattcagagctaatgcca

SEQ ID NO: 1641 - DNA, 21 bp, Artificial Sequence
  Description of Artificial Sequence: Synthetic oligonucleotide
gtgccagaaagattacatgca

SEQ ID NO: 1642 - DNA, 21 bp, Artificial Sequence
  Description of Artificial Sequence: Synthetic oligonucleotide
gcaggtgctttgcaagtattg

SEQ ID NO: 1643 - DNA, 21 bp, Artificial Sequence
  Description of Artificial Sequence: Synthetic oligonucleotide
atagcaacgtgtgagatttcc

SEQ ID NO: 1644 - DNA, 21 bp, Artificial Sequence
  Description of Artificial Sequence: Synthetic oligonucleotide
atctctatcaatacttgcaaa

SEQ ID NO: 1645 - DNA, 21 bp, Artificial Sequence
  Description of Artificial Sequence: Synthetic oligonucleotide
gctaaaagatacctacttaca

SEQ ID NO: 1646 - DNA, 21 bp, Artificial Sequence
  Description of Artificial Sequence: Synthetic oligonucleotide
ttctcagactccacatcattc

SEQ ID NO: 1647 - DNA, 21 bp, Artificial Sequence
  Description of Artificial Sequence: Synthetic oligonucleotide
accacattatctgtaagtagg

SEQ ID NO: 1648 - DNA, 21 bp, Artificial Sequence
  Description of Artificial Sequence: Synthetic oligonucleotide
aggataactaaccaagatctg

SEQ ID NO: 1649 - DNA, 21 bp, Artificial Sequence
  Description of Artificial Sequence: Synthetic oligonucleotide
gtgggtgtccatgccttaact

SEQ ID NO: 1650 - DNA, 21 bp, Artificial Sequence
  Description of Artificial Sequence: Synthetic oligonucleotide
gcaccatccgtactgtctagt

SEQ ID NO: 1651 - DNA, 21 bp, Artificial Sequence
  Description of Artificial Sequence: Synthetic oligonucleotide
attggtacaggggaacatata

SEQ ID NO: 1652 - DNA, 21 bp, Artificial Sequence
  Description of Artificial Sequence: Synthetic oligonucleotide
atatgtgcagacacattcaga

SEQ ID NO: 1653 - DNA, 21 bp, Artificial Sequence
  Description of Artificial Sequence: Synthetic oligonucleotide
ccctcaggtggcgacatgtct

SEQ ID NO: 1654 - DNA, 21 bp, Artificial Sequence
  Description of Artificial Sequence: Synthetic oligonucleotide
tcttagttgcttcactagttt

SEQ ID NO: 1655 - DNA, 21 bp, Artificial Sequence
  Description of Artificial Sequence: Synthetic oligonucleotide
tcacccagctagcatattatt

SEQ ID NO: 1656 - DNA, 21 bp, Artificial Sequence
  Description of Artificial Sequence: Synthetic oligonucleotide
ccactcccttgcaatccaaca

SEQ ID NO: 1657 - DNA, 21 bp, Artificial Sequence
  Description of Artificial Sequence: Synthetic oligonucleotide
gcttgtagaccctggagttaa

SEQ ID NO: 1658 - DNA, 21 bp, Artificial Sequence
  Description of Artificial Sequence: Synthetic oligonucleotide
gtaaacaaccaggaagaatcc

SEQ ID NO: 1659 - DNA, 21 bp, Artificial Sequence
  Description of Artificial Sequence: Synthetic oligonucleotide
agcataccgtatcccctaccc

SEQ ID NO: 1660 - DNA, 21 bp, Artificial Sequence
  Description of Artificial Sequence: Synthetic oligonucleotide
ccctaataaccatcacagtga

SEQ ID NO: 1661 - DNA, 21 bp, Artificial Sequence
  Description of Artificial Sequence: Synthetic oligonucleotide
ggtaggggatacggtatgctg

SEQ ID NO: 1662 - DNA, 21 bp, Artificial Sequence
  Description of Artificial Sequence: Synthetic oligonucleotide
ctctaggagcattacccagtg

SEQ ID NO: 1663 - DNA, 21 bp, Artificial Sequence
  Description of Artificial Sequence: Synthetic oligonucleotide
agtctgtcagcaagataacca

SEQ ID NO: 1664 - DNA, 21 bp, Artificial Sequence
  Description of Artificial Sequence: Synthetic oligonucleotide
catggatcaagagatcataat

SEQ ID NO: 1665 - DNA, 21 bp, Artificial Sequence
  Description of Artificial Sequence: Synthetic oligonucleotide
aatgcgtcagcactaagatac

SEQ ID NO: 1666 - DNA, 21 bp, Artificial Sequence
  Description of Artificial Sequence: Synthetic oligonucleotide
ccttatcataagaaacatcat

SEQ ID NO: 1667 - DNA, 21 bp, Artificial Sequence
  Description of Artificial Sequence: Synthetic oligonucleotide
catagcaccagactgaaagtc

SEQ ID NO: 1668 - DNA, 21 bp, Artificial Sequence
  Description of Artificial Sequence: Synthetic oligonucleotide
caaaagcacctacagaaccaa

SEQ ID NO: 1669 - DNA, 21 bp, Artificial Sequence
  Description of Artificial Sequence: Synthetic oligonucleotide
gagagtggatagtagatatca

SEQ ID NO: 1670 - DNA, 21 bp, Artificial Sequence
  Description of Artificial Sequence: Synthetic oligonucleotide
agttaccctgctcatgaacaa

SEQ ID NO: 1671 - DNA, 21 bp, Artificial Sequence
  Description of Artificial Sequence: Synthetic oligonucleotide
atgtggactcaaatggttact

SEQ ID NO: 1672 - DNA, 21 bp, Artificial Sequence
  Description of Artificial Sequence: Synthetic oligonucleotide
gagcaatatgaactgtcaatg

SEQ ID NO: 1673 - DNA, 21 bp, Artificial Sequence
  Description of Artificial Sequence: Synthetic oligonucleotide
tgtgtgaattaaccattgcag

SEQ ID NO: 1674 - DNA, 21 bp, Artificial Sequence
  Description of Artificial Sequence: Synthetic oligonucleotide
acttgggctcatatgacataa

SEQ ID NO: 1675 - DNA, 21 bp, Artificial Sequence
  Description of Artificial Sequence: Synthetic oligonucleotide
atatctactatccactctcca

SEQ ID NO: 1676 - DNA, 21 bp, Artificial Sequence
  Description of Artificial Sequence: Synthetic oligonucleotide
tccttaccatgttacttgtca

SEQ ID NO: 1677 - DNA, 21 bp, Artificial Sequence
  Description of Artificial Sequence: Synthetic oligonucleotide
cctgtcaatcactggcttaaa

SEQ ID NO: 1678 - DNA, 21 bp, Artificial Sequence
  Description of Artificial Sequence: Synthetic oligonucleotide
atgtatcttgaatcttcctct

SEQ ID NO: 1679 - DNA, 21 bp, Artificial Sequence
  Description of Artificial Sequence: Synthetic oligonucleotide
agttgtaacaccccacacatg

SEQ ID NO: 1680 - DNA, 21 bp, Artificial Sequence
  Description of Artificial Sequence: Synthetic oligonucleotide
ccgtagaggtaaagaactatg

SEQ ID NO: 1681 - DNA, 21 bp, Artificial Sequence
  Description of Artificial Sequence: Synthetic oligonucleotide
gagacaaaacctgaatcaaaa

SEQ ID NO: 1682 - DNA, 21 bp, Artificial Sequence
  Description of Artificial Sequence: Synthetic oligonucleotide
gtgttaagaattcagaatgga

SEQ ID NO: 1683 - DNA, 21 bp, Artificial Sequence
  Description of Artificial Sequence: Synthetic oligonucleotide
atggatcaccaacatgatcag

SEQ ID NO: 1684 - DNA, 21 bp, Artificial Sequence
  Description of Artificial Sequence: Synthetic oligonucleotide
ttacagtgcctacaccaacta

SEQ ID NO: 1685 - DNA, 21 bp, Artificial Sequence
  Description of Artificial Sequence: Synthetic oligonucleotide
agtagtaaccagtctgaacct

SEQ ID NO: 1686 - DNA, 21 bp, Artificial Sequence
  Description of Artificial Sequence: Synthetic oligonucleotide
actctgacccaaagagaattt

SEQ ID NO: 1687 - DNA, 21 bp, Artificial Sequence
  Description of Artificial Sequence: Synthetic oligonucleotide
gggatcataatcgacttcctg

SEQ ID NO: 1688 - DNA, 21 bp, Artificial Sequence
  Description of Artificial Sequence: Synthetic oligonucleotide
tggagtgatcactctcagaac

SEQ ID NO: 1689 - DNA, 21 bp, Artificial Sequence
  Description of Artificial Sequence: Synthetic oligonucleotide
ccagtaatggacataataaca

SEQ ID NO: 1690 - DNA, 21 bp, Artificial Sequence
  Description of Artificial Sequence: Synthetic oligonucleotide
gtagcaagatatgttgcttaa

SEQ ID NO: 1691 - DNA, 21 bp, Artificial Sequence
  Description of Artificial Sequence: Synthetic oligonucleotide
tctgtccccctcaagaccctc

SEQ ID NO: 1692 - DNA, 21 bp, Artificial Sequence
  Description of Artificial Sequence: Synthetic oligonucleotide
aatgtcactctacgccttcga

SEQ ID NO: 1693 - DNA, 21 bp, Artificial Sequence
  Description of Artificial Sequence: Synthetic oligonucleotide
attggataacttaaaaccctc

SEQ ID NO: 1694 - DNA, 21 bp, Artificial Sequence
  Description of Artificial Sequence: Synthetic oligonucleotide
cttcccagcaccgacagtaaa

SEQ ID NO: 1695 - DNA, 21 bp, Artificial Sequence
  Description of Artificial Sequence: Synthetic oligonucleotide
agttatccaatgaaatggagt

SEQ ID NO: 1696 - DNA, 21 bp, Artificial Sequence
  Description of Artificial Sequence: Synthetic oligonucleotide
acactccaccaagcatcccat

SEQ ID NO: 1697 - DNA, 21 bp, Artificial Sequence
  Description of Artificial Sequence: Synthetic oligonucleotide
gcctccactgagcttcagcaa

SEQ ID NO: 1698 - DNA, 21 bp, Artificial Sequence
  Description of Artificial Sequence: Synthetic oligonucleotide
aactgcacttggtagacaaca

SEQ ID NO: 1699 - DNA, 21 bp, Artificial Sequence
  Description of Artificial Sequence: Synthetic oligonucleotide
gctacaagcgatatattccag

SEQ ID NO: 1700 - DNA, 21 bp, Artificial Sequence
  Description of Artificial Sequence: Synthetic oligonucleotide
agatcagctatgtggttacct

SEQ ID NO: 1701 - DNA, 21 bp, Artificial Sequence
  Description of Artificial Sequence: Synthetic oligonucleotide
ccttacaaatctgaacggcat

SEQ ID NO: 1702 - DNA, 21 bp, Artificial Sequence
  Description of Artificial Sequence: Synthetic oligonucleotide
accaaagcaattgaaaccgat

SEQ ID NO: 1703 - DNA, 21 bp, Artificial Sequence
  Description of Artificial Sequence: Synthetic oligonucleotide
ccagagcgtggttccaaagct

SEQ ID NO: 1704 - DNA, 21 bp, Artificial Sequence
  Description of Artificial Sequence: Synthetic oligonucleotide
cttccacaacagtatctaaat

SEQ ID NO: 1705 - DNA, 21 bp, Artificial Sequence
  Description of Artificial Sequence: Synthetic oligonucleotide
gtacacacatttccatggacc

SEQ ID NO: 1706 - DNA, 21 bp, Artificial Sequence
  Description of Artificial Sequence: Synthetic oligonucleotide
gcatgaagctgatgttatccg

SEQ ID NO: 1707 - DNA, 21 bp, Artificial Sequence
  Description of Artificial Sequence: Synthetic oligonucleotide
attcgaatgacggtggaaacg

SEQ ID NO: 1708 - DNA, 21 bp, Artificial Sequence
  Description of Artificial Sequence: Synthetic oligonucleotide
gattgcattaaacattctgga

SEQ ID NO: 1709 - DNA, 21 bp, Artificial Sequence
  Description of Artificial Sequence: Synthetic oligonucleotide
ggttaaccaaagtcttgccac

SEQ ID NO: 1710 - DNA, 21 bp, Artificial Sequence
  Description of Artificial Sequence: Synthetic oligonucleotide
agatatgtatctagtgatcca

SEQ ID NO: 1711 - DNA, 21 bp, Artificial Sequence
  Description of Artificial Sequence: Synthetic oligonucleotide
ccacaaagtggtaccaaaact

SEQ ID NO: 1712 - DNA, 21 bp, Artificial Sequence
  Description of Artificial Sequence: Synthetic oligonucleotide
gaagcagcaatacagatttct

SEQ ID NO: 1713 - DNA, 21 bp, Artificial Sequence
  Description of Artificial Sequence: Synthetic oligonucleotide
aatgcattcaggtggtaccca

SEQ ID NO: 1714 - DNA, 21 bp, Artificial Sequence
  Description of Artificial Sequence: Synthetic oligonucleotide
caggtatgctccagaatcact

SEQ ID NO: 1715 - DNA, 21 bp, Artificial Sequence
  Description of Artificial Sequence: Synthetic oligonucleotide
aagatagtctcgtaaacttcc

SEQ ID NO: 1716 - DNA, 21 bp, Artificial Sequence
  Description of Artificial Sequence: Synthetic oligonucleotide
aaggcgtacgaagagaagtag

SEQ ID NO: 1717 - DNA, 21 bp, Artificial Sequence
  Description of Artificial Sequence: Synthetic oligonucleotide
gatcactagatacatatctga

SEQ ID NO: 1718 - DNA, 21 bp, Artificial Sequence
  Description of Artificial Sequence: Synthetic oligonucleotide
gcacatacattcccatgaata

SEQ ID NO: 1719 - DNA, 21 bp, Artificial Sequence
  Description of Artificial Sequence: Synthetic oligonucleotide
cctgacatcattcgcaattac

SEQ ID NO: 1720 - DNA, 21 bp, Artificial Sequence
  Description of Artificial Sequence: Synthetic oligonucleotide
gtcacccttctagacttcaga

SEQ ID NO: 1721 - DNA, 21 bp, Artificial Sequence
  Description of Artificial Sequence: Synthetic oligonucleotide
ttctaaccactcaaatctagg

SEQ ID NO: 1722 - DNA, 21 bp, Artificial Sequence
  Description of Artificial Sequence: Synthetic oligonucleotide
aggaagacccaatccagatgt

SEQ ID NO: 1723 - DNA, 21 bp, Artificial Sequence
  Description of Artificial Sequence: Synthetic oligonucleotide
catgggaaaactgtcatcata

SEQ ID NO: 1724 - DNA, 21 bp, Artificial Sequence
  Description of Artificial Sequence: Synthetic oligonucleotide
gatacagatacttcaggggat

SEQ ID NO: 1725 - DNA, 21 bp, Artificial Sequence
  Description of Artificial Sequence: Synthetic oligonucleotide
taaccactgtgccaggtactg

SEQ ID NO: 1726 - DNA, 21 bp, Artificial Sequence
  Description of Artificial Sequence: Synthetic oligonucleotide
tagtgtatagagcatgaaatc

SEQ ID NO: 1727 - DNA, 21 bp, Artificial Sequence
  Description of Artificial Sequence: Synthetic oligonucleotide
tgatcactctttgccacacca

SEQ ID NO: 1728 - DNA, 21 bp, Artificial Sequence
  Description of Artificial Sequence: Synthetic oligonucleotide
atgacctcctgtcacagctgg

SEQ ID NO: 1729 - DNA, 21 bp, Artificial Sequence
  Description of Artificial Sequence: Synthetic oligonucleotide
tccccggacaccgggctgaac

SEQ ID NO: 1730 - DNA, 21 bp, Artificial Sequence
  Description of Artificial Sequence: Synthetic oligonucleotide
agtgtacttgacgcatcgcgc

SEQ ID NO: 1731 - DNA, 21 bp, Artificial Sequence
  Description of Artificial Sequence: Synthetic oligonucleotide
ccgagaccgtcctggcgcgat

SEQ ID NO: 1732 - DNA, 21 bp, Artificial Sequence
  Description of Artificial Sequence: Synthetic oligonucleotide
gcagtctacatgtctgagata

SEQ ID NO: 1733 - DNA, 21 bp, Artificial Sequence
  Description of Artificial Sequence: Synthetic oligonucleotide
tgtgttttatctcagacatgt

SEQ ID NO: 1734 - DNA, 21 bp, Artificial Sequence
  Description of Artificial Sequence: Synthetic oligonucleotide
tctcagacatgtagactgcca

SEQ ID NO: 1735 - DNA, 21 bp, Artificial Sequence
  Description of Artificial Sequence: Synthetic oligonucleotide
aaataaatgcacccttgaaag

SEQ ID NO: 1736 - DNA, 21 bp, Artificial Sequence
  Description of Artificial Sequence: Synthetic oligonucleotide
aagggtgcatttatttcaaaa

SEQ ID NO: 1737 - DNA, 21 bp, Artificial Sequence
  Description of Artificial Sequence: Synthetic oligonucleotide
tttcaaaacatccttgcaaca

SEQ ID NO: 1738 - DNA, 21 bp, Artificial Sequence
  Description of Artificial Sequence: Synthetic oligonucleotide
aaaacatccttgcaacattac

SEQ ID NO: 1739 - DNA, 21 bp, Artificial Sequence
  Description of Artificial Sequence: Synthetic oligonucleotide
ttctgctccaaagaagaatct

SEQ ID NO: 1740 - DNA, 21 bp, Artificial Sequence
  Description of Artificial Sequence: Synthetic oligonucleotide
ttcttccttagattcttcttt

SEQ ID NO: 1741 - DNA, 21 bp, Artificial Sequence
  Description of Artificial Sequence: Synthetic oligonucleotide
gagcagaataaaagatctggc

SEQ ID NO: 1742 - DNA, 21 bp, Artificial Sequence
  Description of Artificial Sequence: Synthetic oligonucleotide
tacaaactatgtcttttagaa

SEQ ID NO: 1743 - DNA, 21 bp, Artificial Sequence
  Description of Artificial Sequence: Synthetic oligonucleotide
tccagtctgggcaagattgat

SEQ ID NO: 1744 - DNA, 21 bp, Artificial Sequence
  Description of Artificial Sequence: Synthetic oligonucleotide
gaaataaactatcaatcttgc

SEQ ID NO: 1745 - DNA, 21 bp, Artificial Sequence
  Description of Artificial Sequence: Synthetic oligonucleotide
cagaatactgaaacagggttg

SEQ ID NO: 1746 - DNA, 21 bp, Artificial Sequence
  Description of Artificial Sequence: Synthetic oligonucleotide
agtattctggaaaacggtttc

SEQ ID NO: 1747 - DNA, 21 bp, Artificial Sequence
  Description of Artificial Sequence: Synthetic oligonucleotide
actacttggtacttaccctgc

SEQ ID NO: 1748 - DNA, 21 bp, Artificial Sequence
  Description of Artificial Sequence: Synthetic oligonucleotide
agtttgcagaagctgcctgtg

SEQ ID NO: 1749 - DNA, 21 bp, Artificial Sequence
  Description of Artificial Sequence: Synthetic oligonucleotide
cagaagctgcctgtgatgtgg

SEQ ID NO: 1750 - DNA, 21 bp, Artificial Sequence
  Description of Artificial Sequence: Synthetic oligonucleotide
ctgcgggatccattgagcatc

SEQ ID NO: 1751 - DNA, 21 bp, Artificial Sequence
  Description of Artificial Sequence: Synthetic oligonucleotide
tcaaagattttactgcgggat

SEQ ID NO: 1752 - DNA, 21 bp, Artificial Sequence
  Description of Artificial Sequence: Synthetic oligonucleotide
gggttctttgtttcttctatt

SEQ ID NO: 1753 - DNA, 21 bp, Artificial Sequence
  Description of Artificial Sequence: Synthetic oligonucleotide
tttcttctattttagcacttt

SEQ ID NO: 1754 - DNA, 21 bp, Artificial Sequence
  Description of Artificial Sequence: Synthetic oligonucleotide
ttctattttagcacttttggg

SEQ ID NO: 1755 - DNA, 21 bp, Artificial Sequence
  Description of Artificial Sequence: Synthetic oligonucleotide
gcacttttgggagtgtggaag

SEQ ID NO: 1756 - DNA, 21 bp, Artificial Sequence
  Description of Artificial Sequence: Synthetic oligonucleotide
ggagtgtggaagtccataatt

SEQ ID NO: 1757 - DNA, 21 bp, Artificial Sequence
  Description of Artificial Sequence: Synthetic oligonucleotide
caaccagagaaggttcagaca

SEQ ID NO: 1758 - DNA, 21 bp, Artificial Sequence
  Description of Artificial Sequence: Synthetic oligonucleotide
tggtgggatcctggcataagt

SEQ ID NO: 1759 - DNA, 21 bp, Artificial Sequence
  Description of Artificial Sequence: Synthetic oligonucleotide
ttccccagagacttatgccag

SEQ ID NO: 1760 - DNA, 21 bp, Artificial Sequence
  Description of Artificial Sequence: Synthetic oligonucleotide
cttataatcgattccagctct

SEQ ID NO: 1761 - DNA, 21 bp, Artificial Sequence
  Description of Artificial Sequence: Synthetic oligonucleotide
cttttttgctttcttgtcata

SEQ ID NO: 1762 - DNA, 21 bp, Artificial Sequence
  Description of Artificial Sequence: Synthetic oligonucleotide
ctttcttgtcatagacctgac

SEQ ID NO: 1763 - DNA, 21 bp, Artificial Sequence
  Description of Artificial Sequence: Synthetic oligonucleotide
acacactgaagaaacttgtca

SEQ ID NO: 1764 - DNA, 21 bp, Artificial Sequence
  Description of Artificial Sequence: Synthetic oligonucleotide
ttgtcatagacctgacaagtt

SEQ ID NO: 1765 - DNA, 21 bp, Artificial Sequence
  Description of Artificial Sequence: Synthetic oligonucleotide
ttcagtgtgtgaaaaatcctg

SEQ ID NO: 1766 - DNA, 21 bp, Artificial Sequence
  Description of Artificial Sequence: Synthetic oligonucleotide
gatctctttcccgctacaggg

SEQ ID NO: 1767 - DNA, 21 bp, Artificial Sequence
  Description of Artificial Sequence: Synthetic oligonucleotide
ccgctacagggcatccagatg

SEQ ID NO: 1768 - DNA, 21 bp, Artificial Sequence
  Description of Artificial Sequence: Synthetic oligonucleotide
gggagccgtcttcaggaatct

SEQ ID NO: 1769 - DNA, 21 bp, Artificial Sequence
  Description of Artificial Sequence: Synthetic oligonucleotide
gtagtgtttagggagccgtct

SEQ ID NO: 1770 - DNA, 21 bp, Artificial Sequence
  Description of Artificial Sequence: Synthetic oligonucleotide
ctataggtgggaactgcaaga

SEQ ID NO: 1771 - DNA, 21 bp, Artificial Sequence
  Description of Artificial Sequence: Synthetic oligonucleotide
gagaatgttgagtccttcaag

SEQ ID NO: 1772 - DNA, 21 bp, Artificial Sequence
  Description of Artificial Sequence: Synthetic oligonucleotide
ccagagcaccagagccatgga

SEQ ID NO: 1773 - DNA, 21 bp, Artificial Sequence
  Description of Artificial Sequence: Synthetic oligonucleotide
ccaggttgaactcagcttctg

SEQ ID NO: 1774 - DNA, 21 bp, Artificial Sequence
  Description of Artificial Sequence: Synthetic oligonucleotide
cccaccagggtgtccagctca

SEQ ID NO: 1775 - DNA, 21 bp, Artificial Sequence
  Description of Artificial Sequence: Synthetic oligonucleotide
ctgaggtctataaggccaagc

SEQ ID NO: 1776 - DNA, 21 bp, Artificial Sequence
  Description of Artificial Sequence: Synthetic oligonucleotide
agacagtggcagtcaagatct

SEQ ID NO: 1777 - DNA, 21 bp, Artificial Sequence
  Description of Artificial Sequence: Synthetic oligonucleotide
cctatgaggagtatgcctctt

SEQ ID NO: 1778 - DNA, 21 bp, Artificial Sequence
  Description of Artificial Sequence: Synthetic oligonucleotide
cccaactccgtcttccgctcc

SEQ ID NO: 1779 - DNA, 21 bp, Artificial Sequence
  Description of Artificial Sequence: Synthetic oligonucleotide
ggctttccctgcgtctggacc

SEQ ID NO: 1780 - DNA, 21 bp, Artificial Sequence
  Description of Artificial Sequence: Synthetic oligonucleotide
cctgcgtctggaccctactct

SEQ ID NO: 1781 - DNA, 21 bp, Artificial Sequence
  Description of Artificial Sequence: Synthetic oligonucleotide
tatttttcagatgttgacttg

SEQ ID NO: 1782 - DNA, 21 bp, Artificial Sequence
  Description of Artificial Sequence: Synthetic oligonucleotide
agatgttgacttgagtaaata

SEQ ID NO: 1783 - DNA, 21 bp, Artificial Sequence
  Description of Artificial Sequence: Synthetic oligonucleotide
acttgacttagtgtcatgact

SEQ ID NO: 1784 - DNA, 21 bp, Artificial Sequence
  Description of Artificial Sequence: Synthetic oligonucleotide
gcttcattgacaccattcttt

SEQ ID NO: 1785 - DNA, 21 bp, Artificial Sequence
  Description of Artificial Sequence: Synthetic oligonucleotide
agatctttaatcaatgtgtca

SEQ ID NO: 1786 - DNA, 21 bp, Artificial Sequence
  Description of Artificial Sequence: Synthetic oligonucleotide
tctgcaagagtacaaagattg

SEQ ID NO: 1787 - DNA, 21 bp, Artificial Sequence
  Description of Artificial Sequence: Synthetic oligonucleotide
tgagtcactagtaatgtcctt

SEQ ID NO: 1788 - DNA, 21 bp, Artificial Sequence
  Description of Artificial Sequence: Synthetic oligonucleotide
ctttctaggaaacagtggcaa

SEQ ID NO: 1789 - DNA, 21 bp, Artificial Sequence
  Description of Artificial Sequence: Synthetic oligonucleotide
ctttctgtgctttctgcatgt

SEQ ID NO: 1790 - DNA, 21 bp, Artificial Sequence
  Description of Artificial Sequence: Synthetic oligonucleotide
ccaattccactaattgtttgg

SEQ ID NO: 1791 - DNA, 21 bp, Artificial Sequence
  Description of Artificial Sequence: Synthetic oligonucleotide
tagatgtgaacatggaatcat

SEQ ID NO: 1792 - DNA, 21 bp, Artificial Sequence
  Description of Artificial Sequence: Synthetic oligonucleotide
cagagagtgcctacttgaact

SEQ ID NO: 1793 - DNA, 21 bp, Artificial Sequence
  Description of Artificial Sequence: Synthetic oligonucleotide
tggtccctcccaccctcagga

SEQ ID NO: 1794 - DNA, 21 bp, Artificial Sequence
  Description of Artificial Sequence: Synthetic oligonucleotide
ggtgtgggagatctctgcttc

SEQ ID NO: 1795 - DNA, 21 bp, Artificial Sequence
  Description of Artificial Sequence: Synthetic oligonucleotide
agatccaggatactgagggca

SEQ ID NO: 1796 - DNA, 21 bp, Artificial Sequence
  Description of Artificial Sequence: Synthetic oligonucleotide
cttcctctggggtagcagaca

SEQ ID NO: 1797 - DNA, 21 bp, Artificial Sequence
  Description of Artificial Sequence: Synthetic oligonucleotide
cacaggagccgacctgcctac

SEQ ID NO: 1798 - DNA, 21 bp, Artificial Sequence
  Description of Artificial Sequence: Synthetic oligonucleotide
ctgctggcctcacttatgaca

SEQ ID NO: 1799 - DNA, 200 bp, Artificial Sequence
  Description of Artificial Sequence: Synthetic polynucleotide
gcacagttttgtctgtgatatacacatcagaatccttactttgtgacacatttgtttgagaatcaaaatcggtgaataggcagacagacttgtcactggagcagggtcagggttctggatatctgtgggacaagaggatcagggttaggacatgatctcatttccctctttgccccaacccaggctggagtccagatgcc

SEQ ID NO: 1800 - DNA, 200 bp, Artificial Sequence
  Description of Artificial Sequence: Synthetic polynucleotide
caactttcagcagcttacaaaagaatgtaagacttaccccacttaactatcttgggctgtgacaaagtcacatggttcacacggcaggcatactcatcttgtacaagagatagaaagaccagtccttgctgaaagacaagtctgaatgctccactttttcaattctctctccattcttcagtaagtcaacttcaatgtcg

SEQ ID NO: 1801 - DNA, 200 bp, Artificial Sequence
  Description of Artificial Sequence: Synthetic polynucleotide
atcctcacccccatccccaattcagaatggtttctctgtttatctggaatggcaggaccagctgagactgcacgctaaattaagatgctttcccggccttgacccagcagggcgtggagccaggcaacgcattgtgtaggaatcccagccaggcagcagctcccggagtctggcagcccctcctcgtgccctcagcttcc

SEQ ID NO: 1802 - DNA, 200 bp, Artificial Sequence; identical to SEQ ID NO: 1799
  Description of Artificial Sequence: Synthetic polynucleotide

SEQ ID NO: 1803 - DNA, 200 bp, Artificial Sequence
  Description of Artificial Sequence: Synthetic polynucleotide
accctgccgtgtaccagctgagagactctaaatccagtgacaagtctgtctgcctattcaccgattttgattctcaaacaaatgtgtcacaaagtaaggattgataaactgtgctagacatgaggtctatggacttcaagagcaacagtgctgtggcctggagcaacaaatctgactttgcatgtgcaaacgccttcaac

SEQ ID NO: 1804 - DNA, 200 bp, Artificial Sequence
  Description of Artificial Sequence: Synthetic polynucleotide
gttgaaggcgtttgcacatgcaaagtcagatttgttgctccaggccacagcactgttgctcttgaagtccatagacctcatgtctagcacagtttatcaatccttactttgtgacacatttgtttgagaatcaaaatcggtgaataggcagacagacttgtcactggatttagagtctctcagctggtacacggcagggt

SEQ ID NO: 1805 - DNA, 200 bp, Artificial Sequence
  Description of Artificial Sequence: Synthetic polynucleotide
cgaaggcaccaaagctgcccttacctgggctggggaagaaggtgtcttctggaataatgctgttgttgaaggcgtttgcacatgcaaagtcagattatcagttgctcttgaagtccatagacctcatgtctagcacagttttgtctgtgatatacacatcagaatccttactttgtgacacatttgtttgagaatcaaaa

SEQ ID NO: 1806 - DNA, 200 bp, Artificial Sequence
  Description of Artificial Sequence: Synthetic polynucleotide
tccgtgctgaccccactgtgcacctccttcccattcacccaccagctcagctccacgtggtcagggaagaagcctgtggccaggcacaccagtgtggccttgatggctcaaacacagcgacctcgggtgggaacaccttgttcaggtcctctggaaagggaagaggggttggagccagggttgctctgagagctgtctgg

SEQ ID NO: 1807 - DNA, 200 bp, Artificial Sequence; identical to SEQ ID NO: 1806
  Description of Artificial Sequence: Synthetic polynucleotide

SEQ ID NO: 1808 - DNA, 200 bp, Artificial Sequence
  Description of Artificial Sequence: Synthetic polynucleotide
cccctaccagaaccagacagctctcagagcaaccctggctccaacccctcttccctttccagaggacctgaacaaggtgttcccacccgaggtcgctgtgcccacacccaaaaggccacactggtgtgcctggccacaggcttcttccctgaccacgtggagctgagctggtgggtgaatgggaaggaggtgcacagtgg

SEQ ID NO: 1809 - DNA, 200 bp, Artificial Sequence
  Description of Artificial Sequence: Synthetic polynucleotide
cccctaccaggaccagacagctcttagagcaaccctagccccattacctcttccctttccagaggacctgaaaaacgtgttcccacccaaggtcgctgtgcccacacccaaaaggccacactggtgtgcctggccacaggcttctaccccgaccacgtggagctgagctggtgggtgaatgggaaggaggtgcacagtgg

SEQ ID NO: 1810 - DNA, 200 bp, Artificial Sequence
  Description of Artificial Sequence: Synthetic polynucleotide
acactgctgctgagatggtaagtgagagaatgtgggcctgtgcctaggccacccagctggcccctgactggccacgcctgtcagcttgataacatgacattagaagtcatctcagaaatgtttgacctccaggtaagatgcttctctctgacatagctttccagaagcccctgccctggggtggaggtggggactccatt

SEQ ID NO: 1811 - DNA, 200 bp, Artificial Sequence
  Description of Artificial Sequence: Synthetic polynucleotide
ctgctgagatggtaagtgagagaatgtgggcctgtgcctaggccacccagctggcccctgactggccacgcctgtcagcttgataacatgacattttccttcatctcagaaatgtttgacctccaggtaagatgcttctctctgacatagctttccagaagcccctgccctggggtggaggtggggactccattttagat

SEQ ID NO: 1812 - DNA, 200 bp, Artificial Sequence
  Description of Artificial Sequence: Synthetic polynucleotide
aagccctactcctgggggctgggggcagcagcaaaaaggagtggtggagagttcttgtaccactgtgggcacttggccactgctcaccgacgaacgacatagacccgcctggagctgtacaagcagggcctgcggggcagcctcaccaagctcaagggccccttgaccatgatggccagccactacaagcagcactgccc

SEQ ID NO: 1813 - DNA, 200 bp, Artificial Sequence
  Description of Artificial Sequence: Synthetic polynucleotide
aattctgaaaattccttcagtgacaggtgatcctcatcactgcctatgtttttatcatcctcatcaccgcctatgtttttatcattgtgttgccatagtatgtcaatattactgtggttccagagatggagactttatatgctggggagaaagaagggaaattggcagaagaaaccaggacaattttagaaaaggcaaat

SEQ ID NO: 1814 - DNA, 200 bp, Artificial Sequence
  Description of Artificial Sequence: Synthetic polynucleotide
gcccttttgaatggtcctccctaaagagccggtggtacctgttctggagacctggattacctcttgccctcaggtagagataaaagttcgcatcttctggtaataaccactttgctccaattctgaaaattccttcagtgacaggtgatcctcatcactgcctatgtttttatcatcctcatcaccgcctatgtttttat

SEQ ID NO: 1815 - DNA, 200 bp, Artificial Sequence
  Description of Artificial Sequence: Synthetic polynucleotide
agaggagtttaaccattaggtaacatgacttcggcatcccagcctttccccttgggtggctaccgctcagatgctgtgtgacttaccagatgttgttttaatgtgccgcaatttgaggattctgatcacctgaaatggaaccaaaaactgtcaggctaaaataatgcaaaaactgcccacaaaactatctggtccagttc

SEQ ID NO: 1816 - DNA, 200 bp, Artificial Sequence
  Description of Artificial Sequence: Synthetic polynucleotide
aaatgggaaacagctgaccgttaaaagacaaggactctattatatctatgcccaagtcaccttctgttccaatcgggaagcttcgagtcaagctccattacccccggtagattcgagagaatcttactcagagctgcaaatacccacagttccgccaaaccttgcgggcaacaatccattcacttgggaggagtatttga

SEQ ID NO: 1817 - DNA, 200 bp, Artificial Sequence
  Description of Artificial Sequence: Synthetic polynucleotide
tgcgaggtacctgaagcggctgcagccggggacactgcgggcgcggcagctgctggagctgctgcactgcgcccacgaggccgaggaggctggaatttgaccccggccgcctctcttttctgggcacccgcctcacgcctcctgatgcacatgtactgggcaaggccttggaggcggcgggccaagacttctccctggac

SEQ ID NO: 1818 - DNA, 200 bp, Artificial Sequence
  Description of Artificial Sequence: Synthetic polynucleotide
tctaaaaaaacaaatttaaattaattttgaaaaagtcagccggactttgggggcccgattcagcaggaagggcaggcccagctcactcacttgagggtaaggtggctgagagctgcgagacaccctcgtccccgatcttgttctcactcagcgcatccaggctgcaggtggaatcagatgggggccatcagctagcgtcc

SEQ ID NO: 1819 - DNA, 200 bp, Artificial Sequence
  Description of Artificial Sequence: Synthetic polynucleotide
tgctgaccccactgtgcacctccttcccattcacccaccagctcagctccacgtggtcggggtagaagcctgtggccaggcacaccagtgtggccttttgtgatggctcaaacacagcgaccttgggtgggaacacgtttttcaggtcctctggaaagggaagaggtaatggggctagggttgctctaagagctgtctgg

SEQ ID NO: 1820 - protein, 6 aa, Artificial Sequence
  Description of Artificial Sequence: Synthetic 6xHis tag
HHHHHH

SEQ ID NO: 1821 - protein, 7 aa, Artificial Sequence
  Description of Artificial Sequence: Synthetic peptide
GHHHHHH

SEQ ID NO: 1822 - protein, 8 aa, Artificial Sequence
  Description of Artificial Sequence: Synthetic 8xHis tag
HHHHHHHH

SEQ ID NO: 1823 - protein, 9 aa, Artificial Sequence
  Description of Artificial Sequence: Synthetic peptide
GHHHHHHHH

SEQ ID NO: 1824 - RNA, 12 nt, Artificial Sequence
  Description of Artificial Sequence: Synthetic oligonucleotide
uaauuucuacuc

SEQ ID NO: 1825 - RNA, 29 nt, Artificial Sequence
  Description of Artificial Sequence: Synthetic oligonucleotide
uuguagaucacaggagccgaccugccuac

SEQ ID NO: 1826 - RNA, 29 nt, Artificial Sequence
  Description of Artificial Sequence: Synthetic oligonucleotide
uuguagauagccaucagaagcagagaucu

SEQ ID NO: 1827 - RNA, 29 nt, Artificial Sequence
  Description of Artificial Sequence: Synthetic oligonucleotide
uuguagauagauccaggauacugagggca

SEQ ID NO: 1828 - RNA, 29 nt, Artificial Sequence
  Description of Artificial Sequence: Synthetic oligonucleotide
uuguagaucugcuggccucacuuaugaca

SEQ ID NO: 1829 - DNA, 21 bp, Artificial Sequence
  Description of Artificial Sequence: Synthetic oligonucleotide
acaacagccatcctgcaggca

SEQ ID NO: 1830 - DNA, 21 bp, Artificial Sequence
  Description of Artificial Sequence: Synthetic oligonucleotide
ggatccagcaaggcaacgctc

SEQ ID NO: 1831 - DNA, 21 bp, Artificial Sequence
  Description of Artificial Sequence: Synthetic oligonucleotide
ggatgcagcaggccaagggtc

SEQ ID NO: 1832 - DNA, 21 bp, Artificial Sequence
  Description of Artificial Sequence: Synthetic oligonucleotide
ggatccagcatgccaaggctt

SEQ ID NO: 1833 - DNA, 21 bp, Artificial Sequence
  Description of Artificial Sequence: Synthetic oligonucleotide
cagaagacagtgaggaagagg

SEQ ID NO: 1834 - DNA, 21 bp, Artificial Sequence
  Description of Artificial Sequence: Synthetic oligonucleotide
cagaagacaggtgtgatgaga

SEQ ID NO: 1835 - DNA, 21 bp, Artificial Sequence
  Description of Artificial Sequence: Synthetic oligonucleotide
cagaagaaagggagggagaga

SEQ ID NO: 1836 - DNA, 21 bp, Artificial Sequence
  Description of Artificial Sequence: Synthetic oligonucleotide
cagaagagagggaagaagaaa

SEQ ID NO: 1837 - DNA, 21 bp, Artificial Sequence
  Description of Artificial Sequence: Synthetic oligonucleotide
tagaacacagggataaagaga

SEQ ID NO: 1838 - DNA, 21 bp, Artificial Sequence
  Description of Artificial Sequence: Synthetic oligonucleotide
cagaagatacagatgaagaga

SEQ ID NO: 1839 - DNA, 21 bp, Artificial Sequence
  Description of Artificial Sequence: Synthetic oligonucleotide
caaaagacatggatggagaga

SEQ ID NO: 1840 - DNA, 21 bp, Artificial Sequence
  Description of Artificial Sequence: Synthetic oligonucleotide
cagaacacaggaataaagaga

SEQ ID NO: 1841 - DNA, 21 bp, Artificial Sequence
  Description of Artificial Sequence: Synthetic oligonucleotide
agagggccaaggctcagctga

SEQ ID NO: 1842 - DNA, 21 bp, Artificial Sequence
  Description of Artificial Sequence: Synthetic oligonucleotide
aggggaacaaggctcagctca

SEQ ID NO: 1843 - DNA, 21 bp, Artificial Sequence
  Description of Artificial Sequence: Synthetic oligonucleotide
agcggtccaagcctcagctga

SEQ ID NO: 1844 - DNA, 21 bp, Artificial Sequence
  Description of Artificial Sequence: Synthetic oligonucleotide
agaggcccaaggctcagctca

SEQ ID NO: 1845 - DNA, 21 bp, Artificial Sequence
  Description of Artificial Sequence: Synthetic oligonucleotide
aggccttacgtgaggtgtggg

SEQ ID NO: 1846 - DNA, 21 bp, Artificial Sequence
  Description of Artificial Sequence: Synthetic oligonucleotide
aggccttgcctgatgccaggg

SEQ ID NO: 1847 - DNA, 21 bp, Artificial Sequence
  Description of Artificial Sequence: Synthetic oligonucleotide
ttcctccctctagtggcttaa

SEQ ID NO: 1848 - DNA, 21 bp, Artificial Sequence
  Description of Artificial Sequence: Synthetic oligonucleotide
gtccaccctctattgactgag

SEQ ID NO: 1849 - DNA, 21 bp, Artificial Sequence
  Description of Artificial Sequence: Synthetic oligonucleotide
gtgctccctccagtggctcag

SEQ ID NO: 1850 - DNA, 21 bp, Artificial Sequence
  Description of Artificial Sequence: Synthetic oligonucleotide
gttctgcctctagtggatgag

SEQ ID NO: 1851 - DNA, 21 bp, Artificial Sequence
  Description of Artificial Sequence: Synthetic oligonucleotide
ctagtaagtggtagcaccagc

SEQ ID NO: 1852 - DNA, 21 bp, Artificial Sequence
  Description of Artificial Sequence: Synthetic oligonucleotide
gttttaaatagtagcagcagc

SEQ ID NO: 1853 - DNA, 21 bp, Artificial Sequence
  Description of Artificial Sequence: Synthetic oligonucleotide
cttataagtagtaggagcagt

SEQ ID NO: 1854 - DNA, 21 bp, Artificial Sequence
  Description of Artificial Sequence: Synthetic oligonucleotide
cttaaaagcagtagcagcagc

SEQ ID NO: 1855 - DNA, 21 bp, Artificial Sequence
  Description of Artificial Sequence: Synthetic oligonucleotide
ctcataagtagtagcagcagc

SEQ ID NO: 1856 - DNA, 21 bp, Artificial Sequence
  Description of Artificial Sequence: Synthetic oligonucleotide
cttttaagtagcaacagcagc

SEQ ID NO: 1857 - DNA, 21 bp, Artificial Sequence
  Description of Artificial Sequence: Synthetic oligonucleotide
cttttaaagagtagcagcagc

SEQ ID NO: 1858 - DNA, 21 bp, Artificial Sequence
  Description of Artificial Sequence: Synthetic oligonucleotide
aaagggtgcttagcaccaggg

SEQ ID NO: 1859 - DNA, 21 bp, Artificial Sequence
  Description of Artificial Sequence: Synthetic oligonucleotide
aaagcatgcttaccaccaggc

SEQ ID NO: 1860 - DNA, 21 bp, Artificial Sequence
  Description of Artificial Sequence: Synthetic oligonucleotide
gcacgaagcactccgctgtgc

SEQ ID NO: 1861 - DNA, 21 bp, Artificial Sequence
  Description of Artificial Sequence: Synthetic oligonucleotide
gcaatgagctctcagatgtgt

SEQ ID NO: 1862 - DNA, 21 bp, Artificial Sequence
  Description of Artificial Sequence: Synthetic oligonucleotide
gaaggaagctctccagtgtgt

SEQ ID NO: 1863 - DNA, 21 bp, Artificial Sequence
  Description of Artificial Sequence: Synthetic oligonucleotide
ccacgaagctctctgaaatgt

SEQ ID NO: 1864 - DNA, 21 bp, Artificial Sequence
  Description of Artificial Sequence: Synthetic oligonucleotide
tgttcagagacaatagaagcc

SEQ ID NO: 1865 - DNA, 21 bp, Artificial Sequence
  Description of Artificial Sequence: Synthetic oligonucleotide
tctgcagggacattgagagct

SEQ ID NO: 1866 - DNA, 21 bp, Artificial Sequence
  Description of Artificial Sequence: Synthetic oligonucleotide
tctgcaaggtcaacaggaacc

SEQ ID NO: 1867 - DNA, 21 bp, Artificial Sequence
  Description of Artificial Sequence: Synthetic oligonucleotide
tctgcagggacaaaatcaggc

SEQ ID NO: 1868 - DNA, 21 bp, Artificial Sequence
  Description of Artificial Sequence: Synthetic oligonucleotide
tcatcagagacaatagaagcc

SEQ ID NO: 1869 - DNA, 21 bp, Artificial Sequence
  Description of Artificial Sequence: Synthetic oligonucleotide
actgcagagactataggatcc

SEQ ID NO: 1870 - DNA, 21 bp, Artificial Sequence
  Description of Artificial Sequence: Synthetic oligonucleotide
tctgcagggaatattgcagcc

SEQ ID NO: 1871 - DNA, 21 bp, Artificial Sequence
  Description of Artificial Sequence: Synthetic oligonucleotide
tctggaaggtcaaaaggagcc

SEQ ID NO: 1872 - DNA, 21 bp, Artificial Sequence
  Description of Artificial Sequence: Synthetic oligonucleotide
tctgcaggaaccacaggaacc

SEQ ID NO: 1873 - DNA, 21 bp, Artificial Sequence
  Description of Artificial Sequence: Synthetic oligonucleotide
tctgcaaggaaaaaaggaggc

SEQ ID NO: 1874 - DNA, 21 bp, Artificial Sequence
  Description of Artificial Sequence: Synthetic oligonucleotide
tctgcaggggcaataggggaa

SEQ ID NO: 1875 - DNA, 21 bp, Artificial Sequence
  Description of Artificial Sequence: Synthetic oligonucleotide
tctgaagggacagtgggatcc

SEQ ID NO: 1876 - DNA, 21 bp, Artificial Sequence
  Description of Artificial Sequence: Synthetic oligonucleotide
ccagcagggacaataggagtt

SEQ ID NO: 1877 - DNA, 21 bp, Artificial Sequence
  Description of Artificial Sequence: Synthetic oligonucleotide
tctccagggaccataggggct

SEQ ID NO: 1878 - DNA, 21 bp, Artificial Sequence
  Description of Artificial Sequence: Synthetic oligonucleotide
tctgcagcgaagatcggagcc

SEQ ID NO: 1879 - DNA, 21 bp, Artificial Sequence
  Description of Artificial Sequence: Synthetic oligonucleotide
tctgcagggagtagaggaacc

SEQ ID NO: 1880 - DNA, 21 bp, Artificial Sequence
  Description of Artificial Sequence: Synthetic oligonucleotide
tctacaggggcaatcggagct

SEQ ID NO: 1881 - DNA, 21 bp, Artificial Sequence
  Description of Artificial Sequence: Synthetic oligonucleotide
gctgcagggacaacctgagcc

SEQ ID NO: 1882 - DNA, 21 bp, Artificial Sequence
  Description of Artificial Sequence: Synthetic oligonucleotide
actgcaggtataataggggcc

SEQ ID NO: 1883 - DNA, 21 bp, Artificial Sequence
  Description of Artificial Sequence: Synthetic oligonucleotide
cctgcctggacattaggagcc

SEQ ID NO: 1884 - DNA, 21 bp, Artificial Sequence
  Description of Artificial Sequence: Synthetic oligonucleotide
tctccagagccaataggagct

SEQ ID NO: 1885 - DNA, 21 bp, Artificial Sequence
  Description of Artificial Sequence: Synthetic oligonucleotide
gggtgcatacatgtgtgcctg

SEQ ID NO: 1886 - DNA, 21 bp, Artificial Sequence
  Description of Artificial Sequence: Synthetic oligonucleotide
ggtcacctggattccttgaga

SEQ ID NO: 1887 - DNA, 21 bp, Artificial Sequence
  Description of Artificial Sequence: Synthetic oligonucleotide
ggtcccctggagccctgcgga

SEQ ID NO: 1888 - DNA, 21 bp, Artificial Sequence
  Description of Artificial Sequence: Synthetic oligonucleotide
tgtcatctggacccctgggga

SEQ ID NO: 1889 - DNA, 21 bp, Artificial Sequence
  Description of Artificial Sequence: Synthetic oligonucleotide
ggtcagctggatccatggtga

SEQ ID NO: 1890 - DNA, 21 bp, Artificial Sequence
  Description of Artificial Sequence: Synthetic oligonucleotide
tatgacctgccttgaggggag

SEQ ID NO: 1891 - DNA, 21 bp, Artificial Sequence
  Description of Artificial Sequence: Synthetic oligonucleotide
tatgacctgtttgctggggag

SEQ ID NO: 1892 - DNA, 21 bp, Artificial Sequence
  Description of Artificial Sequence: Synthetic oligonucleotide
tatgaactgtataaaggggag
